(19) United States
(12) Patent Application Publication
(10) Pub. No.: US 2010/0269219 A1
(43) Pub. Date: Oct. 21, 2010

(54) PLANTS HAVING ENHANCED YIELD-RELATED TRAITS AND A METHOD FOR MAKING THE SAME

(75) Inventors: Christophe Reuzeau, Tocan Saint Apre (FR); Valerie Frankard, Waterloo (BE); Yves Hatzfeld, Lille (FR); Ana Isabel Sanz Molinero, Gentbrugge (BE)

Correspondence Address: CONNOLLY BOVE LODGE & HUTZ, LLP, P O BOX 2207, WILMINGTON, DE, 19899, US

(73) Assignee: BASF PLANT SCIENCE GMBH, LUDWIGSHAFEN (DE)

(21) Appl. No.: 12/808,208

(22) PCT Filed: Dec. 22, 2008
(86) PCT No.: PCT/EP08/68129

§ 371 Date: Jun. 15, 2010

Related U.S. Application Data
(60) Provisional application No. 61/027,155, filed on Feb. 8, 2008.
(60) Provisional application No. 61/027,105, filed on Feb. 8, 2008.
(60) Provisional application No. 61/027,513, filed on Feb. 11, 2008.
(60) Provisional application No. 61/027,513, filed on Feb. 11, 2008.
(60) Provisional application No. 61/027,499, filed on Feb. 11, 2008.

(30) Foreign Application Priority Data
Dec. 20, 2007 (EP) 071238208
Dec. 21, 2007 (EP) 07124011.3
Dec. 21, 2007 (EP) 07124036.0
Dec. 24, 2007 (EP) 07025090.7

(51) Int. Cl. C12N 15/82; A01H 5/00; C12N 5/10; A01H 5/10; A01G 1/00

(52) U.S. Cl. 800/278; 435/320.1; 800/295; 435/419; 800/298; 47/58.1 R

(57) ABSTRACT

The present invention relates generally to the field of molecular biology and concerns a method for enhancing various yield-related traits in plants by modulating expression in a plant of a nucleic acid encoding a TCP1 or a TCP2 transcription factor. The present invention also concerns plants having modulated expression of a nucleic acid encoding a TCP1 or TCP2 polypeptide, which plants have enhanced yield-related traits relative to corresponding wild type plants or other control plants. The invention also provides constructs useful in the methods of the invention. In another embodiment, the present invention relates generally to the field of molecular biology and concerns a method for enhancing various economically important yield-related traits in plants. More specifically, the present invention concerns a method for enhancing yield-related traits in plants by modulating expression in a plant of a nucleic acid encoding an Epsin-like polypeptide. The present invention also concerns plants having modulated expression of a nucleic acid encoding an Epsin-like polypeptide, which plants have enhanced yield-related traits relative to control plants. The invention also provides constructs comprising a nucleic acid encoding an Epsin-like polypeptide, useful in performing the methods of the invention. In yet another embodiment, the present invention relates generally to the field of molecular biology and concerns a method for increasing various plant yield-related traits by increasing expression in the seeds of a plant, of a nucleic acid sequence encoding a tRNA delta(2)-isopentenylpyrophosphate transferase (IPPT) polypeptide. The present invention also concerns plants having increased expression in the seeds, of a nucleic acid sequence encoding an IPPT polypeptide, which plants have increased yield-related traits relative to control plants. The invention additionally relates to nucleic acid constructs, vectors and plants containing said nucleic acid sequences. In further embodiment, the present invention relates generally to the field of molecular biology and concerns a method for enhancing yield-related traits in plants grown under conditions of sub-optimal nutrient availability, comprising modulating expression in a plant of a nucleic acid encoding a SHORT-ROOT (SHR) polypeptide. The present invention also provides a method for increasing Thousand Kernel Weight (TKW) in plants relative to control plants, comprising modulating expression of a nucleic acid encoding an SHR polypeptide in a plant grown under grown under non-nutrient limiting conditions. The present invention also concerns plants having modulated expression of a nucleic acid encoding an SHR polypeptide, which plants have enhanced yield-related traits relative to corresponding wild type plants or other control plants. The invention also provides constructs useful in the methods of the invention.

[0001] This application claims priority benefit of the following applications: EP 07123820.8, filed Dec. 20, 2007; U.S. 61/027,513, filed Feb. 11, 2008; EP 07124011.3, filed Dec. 21, 2007; U.S. 61/027,105, filed Feb. 8, 2008; EP 07124036.0, filed Dec. 21, 2007; U.S. 61/027,155, filed Feb. 8, 2008; EP 07125090.7, filed Dec. 24, 2007; and U.S. 61/027,499, filed Feb. 11, 2008; the entire contents of each of which being hereby incorporated by reference.

[0002] The present invention relates generally to the field of molecular biology and concerns a method for enhancing various yield-related traits in plants by modulating expression in a plant of a nucleic acid encoding a TCP1 or a TCP2 transcription factor. The present invention also concerns plants having modulated expression of a nucleic acid encoding a TCP1 or TCP2 polypeptide, which plants have enhanced yield-related traits relative to corresponding wild type plants or other control plants. The invention also provides constructs useful in the methods of the invention.

[0003] In another embodiment, the present invention concerns a method for improving various plant growth characteristics by modulating expression in a plant of a nucleic acid encoding an Epsin-like polypeptide. The present invention also concerns plants having modulated expression of a nucleic acid encoding an Epsin-like polypeptide, which plants have improved growth characteristics relative to corresponding wild type plants or other control plants. The invention also provides constructs useful in the methods of the invention.

[0004] In yet another embodiment, the present invention concerns a method for increasing various plant yield-related traits by increasing expression in the seeds of a plant, of a nucleic acid sequence encoding a tRNA delta(2)-isopentenylpyrophosphate transferase (IPPT) polypeptide. The present invention also concerns plants having increased expression in the seeds, of a nucleic acid sequence encoding an IPPT polypeptide, which plants have increased yield-related traits relative to control plants. The invention additionally relates to nucleic acid constructs, vectors and plants containing said nucleic acid sequences.

[0005] In further embodiment, the present invention concerns a method for enhancing yield-related traits in plants grown under conditions of sub-optimal nutrient availability, comprising modulating expression in a plant of a nucleic acid encoding a SHORT-ROOT (SHR) polypeptide. The present invention also provides a method for increasing Thousand Kernel Weight (TKW) in plants relative to control plants, comprising modulating expression of a nucleic acid encoding an SHR polypeptide in a plant grown under grown under non-nutrient limiting conditions. The present invention also concerns plants having modulated expression of a nucleic acid encoding an SHR polypeptide, which plants have enhanced yield-related traits relative to corresponding wild type plants or other control plants. The invention also provides constructs useful in the methods of the invention.

[0006] The ever-increasing world population and the dwindling supply of arable land available for agriculture fuels research towards increasing the efficiency of agriculture. Conventional means for crop and horticultural improvements utilise selective breeding techniques to identify plants having desirable characteristics. However, such selective breeding techniques have several drawbacks, namely that these techniques are typically labour intensive and result in plants that often contain heterogeneous genetic components that may not always result in the desirable trait being passed on from parent plants. Advances in molecular biology have allowed mankind to modify the germplasm of animals and plants. Genetic engineering of plants entails the isolation and manipulation of genetic material (typically in the form of DNA or RNA) and the subsequent introduction of that genetic material into a plant. Such technology has the capacity to deliver crops or plants having various improved economic, agronomic or horticultural traits.

[0007] A trait of particular economic interest is increased yield. Yield is normally defined as the measurable produce of economic value from a crop. This may be defined in terms of quantity and/or quality. Yield is directly dependent on several factors, for example, the number and size of the organs, plant architecture (for example, the number of branches), seed production, leaf senescence and more. Root development, nutrient uptake, stress tolerance and early vigour may also be important factors in determining yield. Optimizing the abovementioned factors may therefore contribute to increasing crop yield.

[0008] Seed yield is a particularly important trait, since the seeds of many plants are important for human and animal nutrition. Crops such as corn, rice, wheat, canola and soybean account for over half the total human caloric intake, whether through direct consumption of the seeds themselves or through consumption of meat products raised on processed seeds. They are also a source of sugars, oils and many kinds of metabolites used in industrial processes. Seeds contain an embryo (the source of new shoots and roots) and an endosperm (the source of nutrients for embryo growth during germination and during early growth of seedlings). The development of a seed involves many genes, and requires the transfer of metabolites from the roots, leaves and stems into the growing seed. The endosperm, in particular, assimilates the metabolic precursors of carbohydrates, oils and proteins and synthesizes them into storage macromolecules to fill out the grain.

[0009] Plant biomass is yield for forage crops like alfalfa, silage corn and hay. Many proxies for yield have been used in grain crops. Chief amongst these are estimates of plant size. Plant size can be measured in many ways depending on species and developmental stage, but include total plant dry weight, above-ground dry weight, above-ground fresh weight, leaf area, stem volume, plant height, rosette diameter, leaf length, root length, root mass, tiller number and leaf number. Many species maintain a conservative ratio between the size of different parts of the plant at a given developmental stage. These allometric relationships are used to extrapolate from one of these measures of size to another (e.g. Tittonell et al 2005 Agric Ecosys & Environ 105: 213). Plant size at an early developmental stage will typically correlate with plant size later in development. A larger plant with a greater leaf area can typically absorb more light and carbon dioxide than a smaller plant and therefore will likely gain a greater weight during the same period (Fasoula & Tollenaar 2005 Maydica 50:39). This is in addition to the potential continuation of the micro-environmental or genetic advantage that the plant had to achieve the larger size initially. There is a strong genetic component to plant size and growth rate (e.g. ter Steege et al 2005 Plant Physiology 139:1078), and so for a range of diverse genotypes plant size under one environmental condition is likely to correlate with size under another (Hittalmani et al 2003 Theoretical Applied Genetics 107:679). In this way a standard environment is used as a proxy for the diverse and dynamic environments encountered at different locations and times by crops in the field.

[0010] Another important trait for many crops is early vigour. Improving early vigour is an important objective of modern rice breeding programs in both temperate and tropical rice cultivars. Long roots are important for proper soil anchorage in water-seeded rice. Where rice is sown directly into flooded fields, and where plants must emerge rapidly through water, longer shoots are associated with vigour. Where drill-seeding is practiced, longer mesocotyls and coleoptiles are important for good seedling emergence. The ability to engineer early vigour into plants would be of great importance in agriculture. For example, poor early vigour has been a limitation to the introduction of maize (Zea mays L.) hybrids based on Corn Belt germplasm in the European Atlantic.

[0011] Harvest index, the ratio of seed yield to aboveground dry weight, is relatively stable under many environmental conditions and so a robust correlation between plant size and grain yield can often be obtained (e.g. Rebetzke et al 2002 Crop Science 42:739). These processes are intrinsically linked because the majority of grain biomass is dependent on current or stored photosynthetic productivity by the leaves and stem of the plant (Gardener et al 1985 Physiology of Crop Plants. Iowa State University Press, pp 68-73). Therefore, selecting for plant size, even at early stages of development, has been used as an indicator for future potential yield (e.g. Tittonell et al 2005 Agric Ecosys & Environ 105: 213). When testing for the impact of genetic differences on stress tolerance, the ability to standardize soil properties, temperature, water and nutrient availability and light intensity is an intrinsic advantage of greenhouse or plant growth chamber environments compared to the field. However, artificial limitations on yield due to poor pollination due to the absence of wind or insects, or insufficient space for mature root or canopy growth, can restrict the use of these controlled environments for testing yield differences. Therefore, measurements of plant size in early development, under standardized conditions in a growth chamber or greenhouse, are standard practices to provide indication of potential genetic yield advantages.

[0012] A further important trait is that of improved abiotic stress tolerance. Abiotic stress is a primary cause of crop loss worldwide, reducing average yields for most major crop plants by more than 50% (Wang et al., Planta (2003) 218: 1-14). Abiotic stresses may be caused by drought, salinity, extremes of temperature, chemical toxicity, excess or deficiency of nutrients (macroelements and/or microelements), radiation and oxidative stress. The ability to improve plant tolerance to abiotic stress would be of great economic advantage to farmers worldwide and would allow for the cultivation of crops during adverse conditions and in territories where cultivation of crops may not otherwise be possible.

[0013] Crop yield may therefore be increased by optimising one of the above-mentioned factors.

[0014] Depending on the end use, the modification of certain yield traits may be favoured over others. For example for applications such as forage or wood production, or bio-fuel resource, an increase in the vegetative parts of a plant may be desirable, and for applications such as flour, starch or oil production, an increase in seed parameters may be particularly desirable. Even amongst the seed parameters, some may be favoured over others, depending on the application. Various mechanisms may contribute to increasing seed yield, whether that is in the form of increased seed size or increased seed number.

[0015] One approach to increasing yield-related traits (seed yield and/or biomass) in plants may be through modification of the inherent growth mechanisms of a plant, such as the cell cycle or various signalling pathways involved in plant growth or in defence mechanisms.

[0016] It has now been found that various yield-related traits may be improved in plants by modulating expression in a plant of a nucleic acid encoding a TCP1 or a TCP2 or an Epsin-like, or an SHR polypeptide as defined herein.

[0017] In another embodiment, it has been found that various yield-related traits may be increased in plants relative to control plants, by increasing expression in the seeds of a plant, of a nucleic acid sequence encoding a tRNA delta(2)-isopentenylpyrophosphate transferase (IPPT) polypeptide. The increased yield-related traits comprise one or more of: increased early vigour, increased aboveground biomass, increased total seed yield per plant, increased total number of seeds, increased number of filled seeds, increased number of flowers per panicles, and increased harvest index.

### BACKGROUND

### TCP1/TCP2 Polypeptides

[0018] Transcription factors are usually defined as proteins that show sequence-specific DNA binding affinity and that are capable of activating and/or repressing transcription. The Arabidopsis thaliana genome codes for at least 1533 transcriptional regulators, accounting for ˜5.9% of its estimated total number of genes (Riechmann et al. (2000) Science 290: 2105-2109). The TCP family of transcription factors is named after its first characterized members (teosinte-branched1 (TB1), cycloidea (CYC) and PCNA factor (PCF); Cubas P et al. (1999) Plant J 18(2): 215-22). In Arabidopsis thaliana, more than 20 members of the TCP family polypeptides have been identified, and classified based on sequence similarity in the TCP domain into Class I (also called Group I or PCF group) transcription factors that positively regulate gene expression, and Class II (also called Group II or CYC-TB1 group) transcription factors that negatively regulate proliferation. All TCP transcription factors are characterized by a non-canonical predicted basic-Helix-Loop-Helix (bHLH), that is required for both DNA binding and homo- and hetero-dimerization (see Cubas et al. above).

[0019] Surprisingly, it has now been found that increasing expression in a plant of a nucleic acid sequence encoding a TCP1 or a TCP2 transcription factor gives plants having enhanced yield-related traits relative to control plants. The particular subgroup of TCP polypeptides suitable for enhancing yield-related traits is described in detail below.

[0020] According one embodiment, there is provided a method for enhancing yield-related traits in plants relative to control plants, comprising modulating expression of a nucleic acid encoding a TCP1 or a TCP2 polypeptide in a plant.

### Epsin-Like Proteins

[0021] Eukaryotic cells possess an elaborate membrane system that functions in uptake of molecules (endocytosis) or in delivery of molecules to the cell exterior (secretory pathway). The secretory pathway leads from the endoplasmatic reticulum via the Golgi apparatus to the cell membrane. The endocytic pathway goes from the cell membrane to the cell interior. All these pathways make use of vesicles that budd off from the organelle where they originate from and which are highly selective with respect to the content they have and to their destination. Newly synthesised proteins need to be transported to the different subcellular locations or exported to the extracellular environment. Intracellular trafficking is controlled by many proteins, which are for example part of the vesicle, or assist in vesicle formation or fusion, or regulate the trafficking or assist in selection of cargo proteins etc. Many of these proteins are shared among plants, yeast and animals, indicating that the intracellular trafficking machinery is conserved among eukaryotes. One such group of proteins is characterised by the presence of a conserved “Epsin N-Terminal Homology” (ENTH) domain. The ENTH domain is capable of binding to phosphatidylinositols and therefore thought to play a role in targeting these proteins to specific compartments and assist in clathrin-mediated budding. ANTH (AP180 N-Terminal homology) domains are postulated to have a similar function as ENTH domains, but are part of structurally different proteins.

[0022] Epsin-like proteins all comprise an ENTH domain, and are postulated to play similar roles in clathrin-coated vesicle formation; Epsin-like proteins are reported to interact with various proteins (Lee et al., Plant Physiology 143, 1561-1575, 2007; Song et al., Plant Cell 18, 2258-2274, 2006).

### Adenylate-1 PTs (AMP Isopentyltransferases/ATP/ADP Isopentyltransferases)

[0023] Phytohormones control plant growth and development, in response to endogenous and environmental stimuli. Examples of phytohormones include abscisic acid, auxins, cytokinins, ethylene, gibberellins, brassinolides, salicyclic acid, jasmonates, signalling peptides, and systemin.

[0024] In plants, naturally occurring cytokinins (CKs) constitute a group of adenine derivatives carrying either an isopentenyl side chain (isoprenoid CKs; most abundant type) or an aromatic group (aromatic CKs; rare), and play an essential role in plant development. The first and rate-limiting step of the biosynthesis of isoprenoid CKs is catalyzed by isopentenyltransferases, which transfer the isopentenyl moiety from delta(2)-dimethylallyl diphosphate (DMAPP) or hydroxymethylbutenyl diphosphate (HMBDP) to position N⁶ on a conjugated adenine. The isopentyltransferases can be subdivided into three subgroups, depending on which conjugated adenine they utilize:
[0025] 1) AMP isopentyltransferases (also named DMAPP:AMP isopentyltransferase, EC 2.5.1.27), which preferentially use adenosine 5′-monophosphate as acceptor molecule; typical examples are found in phytopathogenic bacteria, such as in, Agrobacterium tumefaciens, Pseudomonas syringae, Pseudomonas solanacearum (Ralstonia solanacearum) and Pantoea agglomerans (Erwinia herbicola), nitrogen-fixing symbiotic cyanobacterium Nostoc, or slime mold Disctyostelium discoideum.
[0026] 2) ATP/ADP isopentyltransferases (also named DMAPP:ATP/ADP isopentyltransferase), which preferentially use adenosine 5′-triphosphate or adenosine 5′-diphosphate as acceptor molecule; for example 8 ATP/ADP isopentyltransferases are found in Arabidopsis thaliana (Miyawaki et al (2006) Proc Natl Acad Sci USA 103(44): 16598-16603).
[0027] 3) tRNA isopentyltransferases (also named DMAPP:tRNA isopentyltransferase, or tRNA delta(2) isopentenyl pyrophosphate transferase (IPPT), EC 2.5.1.8), which preferentially use adenine at position 37 of certain tRNAs (located in the cytoplasm, in the plastids and in the mitochondria), next to the anticodon; the enzyme has been purified and the gene cloned from bacteria, yeast, animals, and plants.

[0028] The two first subgroups (collectively named adenylate-IPTs) catalyse the direct de novo biosynthesis of free cytokinins, essentially constituted of isopentenyladenine (iP)-types and transzeatin (tZ)-types of cytokinins. The third subgroup (named tRNA-IPTs or IPPTs) catalyses cytokinin formation by isopentenylation of tRNA, which when degraded liberates cytokinin nucleotides, which in turn will be used to biosynthesize cis-zeatin (cZ)-types of cytokinins. Thus, the rate of tRNA turnover also strongly determines the availability of free cytokinin nucleotides.

[0029] While tRNA is a common source of free cytokinins in prokaryotes (Koenig et al. (2002) J Bacteriol 184:1832-1842), both tRNA- and adenylate-IPT pathways contribute to cytokinin biosynthesis in seed plants (Miyawaki et al. (2006) Proc Natl Acad Sci USA 103(44): 16598-16603). However, the tRNA pathway is generally considered to be insufficient to account for a significant source of cytokinins in seed plants. In conclusion, the two biosynthetic pathways lead to the synthesis of different cytokinins, and in different proportions.

[0030] Both adenylate-IPTs and tRNA-IPTs have in their N-terminus the ATP/GTP P-loop binding motif (A, G)-X4-G-K-(S, T). Another well-known conserved region specific to eucaryotic tRNA-IPTs and absent in prokaryotic tRNA-IPTs, is located at the C-terminus: the Zn-finger-like motif C2H2 (C-X2-C-X(12,18)-H-X5-H. The function of Zn-finger-like motif in tRNA-IPTs is possibly in connection with protein-protein interactions and nuclear localisation (Golovko et al. (2000) Gene 258: 85-93).

[0031] When an adenylate-IPT from Agrobacterium tumefaciens was constitutively overexpressed in plants, or expressed at weaker or conditionally, these showed the typical effects of cytokinin overproduction, such as uncontrolled axillary bud growth (reduced apical dominance), the formation of small curling leaves, delayed root formation, and modified senescence (for example, Luo et al. (2005) Plant Growth Regulation 47:1-47, and references therein)

[0032] Transgenic Arabidopsis and canola plants expressing a bacterial adenylate-IPT under the control of a seed-specific promoter had an average seed yield per plant that was not significantly increased compared to control plants (Roeckel et al. (1997) Transgenic Res 6(2):133-41).

[0033] US patent application 2006/0010515 describes transgenic Arabidopsis thaliana plants expressing an adenylate-IPT from Agrobacterium tumefaciens using independently three cell-cycle regulated promoters, which plants have increased leaf size/vegetative mass, increased plant height, increased branch number, increased flower and silique number.

### Short Root (SHR)

[0034] Members of the GRAS gene family (an acronym based on the designations of known genes: GAI, RGA and SCR) encode transcriptional regulators that have diverse functions in plant growth and development, such as gibberellin signal transduction, root radial patterning, axillary meristem formation, phytochrome A signal transduction, and gametogenesis. Phylogenetic analysis divides the GRAS gene family into eight subfamilies, which have distinct conserved domains and functions (Tian et al., 2004 (Plant Molecular Biology, Volume 54, Number 4, pp 519-532). GRAS proteins contain a conserved region of about 350 amino acids that can be divided in 5 motifs, found in the following order: leucine heptad repeat I, the VHIID motif, leucine heptad repeat II, the PFYRE motif and the SAW motif. SHORT ROOT, or SHR, is a member of the GRAS family of plant transcription factors and is a protein involved in root development.

[0035] Granted U.S. Pat. No. 6,927,320 B1 describes SHR genes and discloses that SHR gene expression controls cell division of certain cell types in roots, affects the organisation of root and stem, and affects gravitropism of aerial structures. It is suggested that modulation of SHR expression levels can be used to modify root and aerial structures of transgenic plants and enhance the agronomic properties of such plants. It is also suggested that plants engineered with SHR overexpression may exhibit improved vigorous growth characteristics which may be identified by examining any of the following parameters: 1. the rate of growth, 2. vegetative yield of the mature plant, 3. seed or fruit yield, 4. seed or fruit weight, 5. total nitrogen content of the plant, 6. total nitrogen content of the fruit or seed, 7. the free amino acid content of the plant, 8. the free amino acid content of the fruit or seed, 9. the total protein content of the plant, and 10. total protein content of the fruit or seed.

### SUMMARY

[0036] Surprisingly, it has now been found that modulating expression of a nucleic acid encoding a TCP1 or a TCP2 polypeptide gives plants having enhanced yield-related traits, in particular increased yield and seed yield relative to control plants.

[0037] Also surprisingly, it has been found that modulating expression of a nucleic acid encoding an Epsin-like polypeptide gives plants having enhanced yield-related traits, in particular increased yield and/or increased early vigour relative to control plants.

[0038] According one embodiment, there is provided a method for improving yield related traits of a plant relative to control plants, comprising modulating expression of a nucleic acid encoding an Epsin-like polypeptide in a plant. The improved yield related traits comprised increased yield and/or increased early vigour.

[0039] Furthermore, surprisingly, it has been found that increasing expression in the seeds of a plant, of a nucleic acid sequence encoding an IPPT polypeptide as defined herein, gives plants having increased yield-related traits relative to control plants.

[0040] According to one embodiment, there is provided a method for increasing yield-related traits in plants relative to control plants, comprising increasing expression in the seeds of a plant, of a nucleic acid sequence encoding an IPPT polypeptide as defined herein. The increased yield-related traits comprise one or more of: increased early vigour, increased aboveground biomass, increased total seed yield per plant, increased total number of seeds, increased number of filled seeds, increased number of flowers per panicles, and increased harvest index.

[0041] Furthermore, surprisingly, it has been found that modulating expression of a nucleic acid encoding an SHR polypeptide in plants grown under conditions of sub-optimal nutrient availability gives the plants enhanced yield-related traits relative to control plants. It has also surprisingly been found that modulating expression of a nucleic acid encoding an SHR polypeptide in plants grown under non-nutrient limiting conditions gives the plants increased Thousand Kernel Weight (TKW) relative to control plants.

[0042] According one embodiment of the present invention, there is therefore provided a method for enhancing plant yield related traits relative to control plants, comprising modulating expression of a nucleic acid encoding an SHR polypeptide in a plant grown under conditions of sub-optimal nutrient availability.

[0043] According to another embodiment of the present invention, there is provided a method for increasing Thousand Kernel Weight (TKW) in plants relative to control plants, comprising modulating expression of a nucleic acid encoding an SHR polypeptide in plants grown under non-nutrient limiting conditions.

### DEFINITIONS

### Polypeptide(s)/Protein(s)

[0044] The terms “polypeptide” and “protein” are used interchangeably herein and refer to amino acids in a polymeric form of any length, linked together by peptide bonds.

### Polynucleotide(s)/Nucleic Acid(s)/Nucleic Acid Sequence(s)/Nucleotide Sequence(s)

[0045] The terms “polynucleotide(s)”, “nucleic acid sequence(s)”, “nucleotide sequence(s)”, “nucleic acid(s)”, “nucleic acid molecule” are used interchangeably herein and refer to nucleotides, either ribonucleotides or deoxyribonucleotides or a combination of both, in a polymeric unbranched form of any length.

### Control Plant(s)

[0046] The choice of suitable control plants is a routine part of an experimental setup and may include corresponding wild type plants or corresponding plants without the gene of interest. The control plant is typically of the same plant species or even of the same variety as the plant to be assessed. The control plant may also be a nullizygote of the plant to be assessed. Nullizygotes are individuals missing the transgene by segregation. A “control plant” as used herein refers not only to whole plants, but also to plant parts, including seeds and seed parts.

### Homologue(s)

[0047] “Homologues” of a protein encompass peptides, oligopeptides, polypeptides, proteins and enzymes having amino acid substitutions, deletions and/or insertions relative to the unmodified protein in question and having similar biological and functional activity as the unmodified protein from which they are derived.

[0048] A deletion refers to removal of one or more amino acids from a protein.

[0049] An insertion refers to one or more amino acid residues being introduced into a predetermined site in a protein. Insertions may comprise N-terminal and/or C-terminal fusions as well as intra-sequence insertions of single or multiple amino acids. Generally, insertions within the amino acid sequence will be smaller than N- or C-terminal fusions, of the order of about 1 to 10 residues. Examples of N- or C-terminal fusion proteins or peptides include the binding domain or activation domain of a transcriptional activator as used in the yeast two-hybrid system, phage coat proteins, (histidine)-6-tag, glutathione S-transferase-tag, protein A, maltose-binding protein, dihydrofolate reductase, Tag•100 epitope, c-myc epitope, FLAG®-epitope, lacZ, CMP (calmodulin-binding peptide), HA epitope, protein C epitope and VSV epitope.

[0050] A substitution refers to replacement of amino acids of the protein with other amino acids having similar properties (such as similar hydrophobicity, hydrophilicity, antigenicity, propensity to form or break α-helical structures or β-sheet structures). Amino acid substitutions are typically of single residues, but may be clustered depending upon functional constraints placed upon the polypeptide; insertions will usually be of the order of about 1 to 10 amino acid residues. The amino acid substitutions are preferably conservative amino acid substitutions. Conservative substitution tables are well known in the art (see for example Creighton (1984) Proteins. W.H. Freeman and Company (Eds) and Table 1 below).

TABLE 1
Examples of conserved amino acid substitutions

| Residue | Conservative Substitutions |
|---|---|
| Ala | Ser |
| Arg | Lys |
| Asn | Gln; His |
| Asp | Glu |
| Gln | Asn |
| Cys | Ser |
| Glu | Asp |
| Gly | Pro |
| His | Asn; Gln |
| Ile | Leu, Val |
| Leu | Ile; Val |
| Lys | Arg; Gln |
| Met | Leu; Ile |
| Phe | Met; Leu; Tyr |
| Ser | Thr; Gly |
| Thr | Ser; Val |
| Trp | Tyr |
| Tyr | Trp; Phe |
| Val | Ile; Leu |

[0051] Amino acid substitutions, deletions and/or insertions may readily be made using peptide synthetic techniques well known in the art, such as solid phase peptide synthesis and the like, or by recombinant DNA manipulation. Methods for the manipulation of DNA sequences to produce substitution, insertion or deletion variants of a protein are well known in the art. For example, techniques for making substitution mutations at predetermined sites in DNA are well known to those skilled in the art and include M13 mutagenesis, T7-Gen in vitro mutagenesis (USB, Cleveland, Ohio), QuickChange Site Directed mutagenesis (Stratagene, San Diego, Calif.), PCR-mediated site-directed mutagenesis or other site-directed mutagenesis protocols.

### Derivatives

[0052] “Derivatives” include peptides, oligopeptides, polypeptides which may, compared to the amino acid sequence of the naturally-occurring form of the protein, such as the protein of interest, comprise substitutions of amino acids with non-naturally occurring amino acid residues, or additions of non-naturally occurring amino acid residues. “Derivatives” of a protein also encompass peptides, oligopeptides, polypeptides which comprise naturally occurring altered (glycosylated, acylated, prenylated, phosphorylated, myristoylated, sulphated etc.) or non-naturally altered amino acid residues compared to the amino acid sequence of a naturally-occurring form of the polypeptide. A derivative may also comprise one or more non-amino acid substituents or additions compared to the amino acid sequence from which it is derived, for example a reporter molecule or other ligand, covalently or non-covalently bound to the amino acid sequence, such as a reporter molecule which is bound to facilitate its detection, and non-naturally occurring amino acid residues relative to the amino acid sequence of a naturally-occurring protein. Furthermore, “derivatives” also include fusions of the naturally-occurring form of the protein with tagging peptides such as FLAG, HIS6 or thioredoxin (for a review of tagging peptides, see Terpe, Appl. Microbiol. Biotechnol. 60, 523-533, 2003).

### Orthologue(s)/Paralogue(s)

[0053] Orthologues and paralogues encompass evolutionary concepts used to describe the ancestral relationships of genes. Paralogues are genes within the same species that have originated through duplication of an ancestral gene; orthologues are genes from different organisms that have originated through speciation, and are also derived from a common ancestral gene.

### Domain

[0054] The term “domain” refers to a set of amino acids conserved at specific positions along an alignment of sequences of evolutionarily related proteins. While amino acids at other positions can vary between homologues, amino acids that are highly conserved at specific positions indicate amino acids that are likely essential in the structure, stability or function of a protein. Identified by their high degree of conservation in aligned sequences of a family of protein homologues, they can be used as identifiers to determine if any polypeptide in question belongs to a previously identified polypeptide family.

### Motif/Consensus Sequence/Signature

[0055] The term “motif” or “consensus sequence” or “signature” refers to a short conserved region in the sequence of evolutionarily related proteins. Motifs are frequently highly conserved parts of domains, but may also include only part of the domain, or be located outside of conserved domain (if all of the amino acids of the motif fall outside of a defined domain).

### Hybridisation

[0056] The term “hybridisation” as defined herein is a process wherein substantially homologous complementary nucleotide sequences anneal to each other. The hybridisation process can occur entirely in solution, i.e. both complementary nucleic acids are in solution. The hybridisation process can also occur with one of the complementary nucleic acids immobilised to a matrix such as magnetic beads, Sepharose beads or any other resin. The hybridisation process can furthermore occur with one of the complementary nucleic acids immobilised to a solid support such as a nitro-cellulose or nylon membrane or immobilised by e.g. photolithography to, for example, a siliceous glass support (the latter known as nucleic acid arrays or microarrays or as nucleic acid chips). In order to allow hybridisation to occur, the nucleic acid molecules are generally thermally or chemically denatured to melt a double strand into two single strands and/or to remove hairpins or other secondary structures from single stranded nucleic acids.

-m-

[0057] The term “stringency” refers to the conditions under which a hybridisation takes place. The stringency of hybridisation is influenced by conditions such as temperature, salt concentration, ionic strength and hybridisation buffer composition. Generally, low stringency conditions are selected to be about 30° C. lower than the thermal melting point (Tₘ) for the specific sequence at a defined ionic strength and pH. Medium stringency conditions are when the temperature is 20° C. below Tₘ, and high stringency conditions are when the temperature is 10° C. below Tₘ. High stringency hybridisation conditions are typically used for isolating hybridising sequences that have high sequence similarity to the target nucleic acid sequence. However, nucleic acids may deviate in sequence and still encode a substantially identical polypeptide, due to the degeneracy of the genetic code. Therefore medium stringency hybridisation conditions may sometimes be needed to identify such nucleic acid molecules.

[0058] The Tm is the temperature under defined ionic strength and pH, at which 50% of the target sequence hybridises to a perfectly matched probe. The Tₘ is dependent upon the solution conditions and the base composition and length of the probe. For example, longer sequences hybridise specifically at higher temperatures. The maximum rate of hybridisation is obtained from about 16° C. up to 32° C. below Tₘ. The presence of monovalent cations in the hybridisation solution reduce the electrostatic repulsion between the two nucleic acid strands thereby promoting hybrid formation; this effect is visible for sodium concentrations of up to 0.4M (for higher concentrations, this effect may be ignored). Formamide reduces the melting temperature of DNA-DNA and DNA-RNA duplexes with 0.6 to 0.7° C. for each percent formamide, and addition of 50% formamide allows hybridisation to be performed at 30 to 45° C., though the rate of hybridisation will be lowered. Base pair mismatches reduce the hybridisation rate and the thermal stability of the duplexes. On average and for large probes, the Tm decreases about 1° C. per % base mismatch. The Tm may be calculated using the following equations, depending on the types of hybrids:

1) DNA-DNA hybrids (Meinkoth and Wahl, Anal. Biochem., 138: 267-284, 1984):

Tₘ=81.5° C.+16.6x log₁₀[Na⁺]^{a}+0.41x%[G/C^{b}]−500x[L^{c}]⁻¹−0.61x% formamide

2) DNA-RNA or RNA-RNA hybrids:

Tm=79.8+18.5(log₁₀[Na⁺]^{a})+0.58(% G/C^{b})+11.8(% G/C^{b})²−820/L^{c}

3) oligo-DNA or oligo-RNA^{d} hybrids:

For <20 nucleotides: Tₘ=2(lₙ)

For 20-35 nucleotides: Tₘ=22+1.46(lₙ)

^{a} or for other monovalent cation, but only accurate in the 0.01-0.4 M range.
^{b} only accurate for % GC in the 30% to 75% range.
^{c}L=length of duplex in base pairs.
^{d} oligo, oligonucleotide; lₙ, =effective length of primer=2×(no. of G/C)+(no. of NT).

[0059] Non-specific binding may be controlled using any one of a number of known techniques such as, for example, blocking the membrane with protein containing solutions, additions of heterologous RNA, DNA, and SDS to the hybridisation buffer, and treatment with Rnase. For non-homologous probes, a series of hybridizations may be performed by varying one of (i) progressively lowering the annealing temperature (for example from 68° C. to 42° C.) or (ii) progressively lowering the formamide concentration (for example from 50% to 0%). The skilled artisan is aware of various parameters which may be altered during hybridisation and which will either maintain or change the stringency conditions.

[0060] Besides the hybridisation conditions, specificity of hybridisation typically also depends on the function of post-hybridisation washes. To remove background resulting from non-specific hybridisation, samples are washed with dilute salt solutions. Critical factors of such washes include the ionic strength and temperature of the final wash solution: the lower the salt concentration and the higher the wash temperature, the higher the stringency of the wash. Wash conditions are typically performed at or below hybridisation stringency. A positive hybridisation gives a signal that is at least twice of that of the background. Generally, suitable stringent conditions for nucleic acid hybridisation assays or gene amplification detection procedures are as set forth above. More or less stringent conditions may also be selected. The skilled artisan is aware of various parameters which may be altered during washing and which will either maintain or change the stringency conditions.

[0061] For example, typical high stringency hybridisation conditions for DNA hybrids longer than 50 nucleotides encompass hybridisation at 65° C. in 1×SSC or at 42° C. in 1×SSC and 50% formamide, followed by washing at 65° C. in 0.3×SSC. Examples of medium stringency hybridisation conditions for DNA hybrids longer than 50 nucleotides encompass hybridisation at 50° C. in 4×SSC or at 40° C. in 6×SSC and 50% formamide, followed by washing at 50° C. in 2×SSC. The length of the hybrid is the anticipated length for the hybridising nucleic acid. When nucleic acids of known sequence are hybridised, the hybrid length may be determined by aligning the sequences and identifying the conserved regions described herein. 1×SSC is 0.15M NaCl and 15 mM sodium citrate; the hybridisation solution and wash solutions may additionally include 5×Denhardt's reagent, 0.5-1.0% SDS, 100 μg/ml denatured, fragmented salmon sperm DNA, 0.5% sodium pyrophosphate.

[0062] For the purposes of defining the level of stringency, reference can be made to Sambrook et al. (2001) Molecular Cloning: a laboratory manual, 3^{rd} Edition, Cold Spring Harbor Laboratory Press, CSH, New York or to Current Protocols in Molecular Biology, John Wiley & Sons, N.Y. (1989 and yearly updates).

### Splice Variant

[0063] The term “splice variant” as used herein encompasses variants of a nucleic acid sequence in which selected introns and/or exons have been excised, replaced, displaced or added, or in which introns have been shortened or lengthened. Such variants will be ones in which the biological activity of the protein is substantially retained; this may be achieved by selectively retaining functional segments of the protein. Such splice variants may be found in nature or may be manmade. Methods for predicting and isolating such splice variants are well known in the art (see for example Foissac and Schiex (2005) BMC Bioinformatics 6: 25).

### Allelic Variant

[0064] Alleles or allelic variants are alternative forms of a given gene, located at the same chromosomal position. Allelic variants encompass Single Nucleotide Polymorphisms (SNPs), as well as Small Insertion/Deletion Polymorphisms (INDELs). The size of INDELs is usually less than 100 bp. SNPs and INDELs form the largest set of sequence variants in naturally occurring polymorphic strains of most organisms.

### Gene Shuffling/Directed Evolution

[0065] Gene shuffling or directed evolution consists of iterations of DNA shuffling followed by appropriate screening and/or selection to generate variants of nucleic acids or portions thereof encoding proteins having a modified biological activity (Castle et al., (2004) Science 304(5674): 1151-4; U.S. Pat. Nos. 5,811,238 and 6,395,547).

### Regulatory Element/Control Sequence/Promoter

[0066] The terms “regulatory element”, “control sequence” and “promoter” are all used interchangeably herein and are to be taken in a broad context to refer to regulatory nucleic acid sequences capable of effecting expression of the sequences to which they are ligated. The term “promoter” typically refers to a nucleic acid control sequence located upstream from the transcriptional start of a gene and which is involved in recognising and binding of RNA polymerase and other proteins, thereby directing transcription of an operably linked nucleic acid. Encompassed by the aforementioned terms are transcriptional regulatory sequences derived from a classical eukaryotic genomic gene (including the TATA box which is required for accurate transcription initiation, with or without a CCAAT box sequence) and additional regulatory elements (i.e. upstream activating sequences, enhancers and silencers) which alter gene expression in response to developmental and/or external stimuli, or in a tissue-specific manner. Also included within the term is a transcriptional regulatory sequence of a classical prokaryotic gene, in which case it may include a −35 box sequence and/or −10 box transcriptional regulatory sequences. The term “regulatory element” also encompasses a synthetic fusion molecule or derivative that confers, activates or enhances expression of a nucleic acid molecule in a cell, tissue or organ.

[0067] A “plant promoter” comprises regulatory elements, which mediate the expression of a coding sequence segment in plant cells. Accordingly, a plant promoter need not be of plant origin, but may originate from viruses or micro-organisms, for example from viruses which attack plant cells. The “plant promoter” can also originate from a plant cell, e.g. from the plant which is transformed with the nucleic acid sequence to be expressed in the inventive process and described herein. This also applies to other “plant” regulatory signals, such as “plant” terminators. The promoters upstream of the nucleotide sequences useful in the methods of the present invention can be modified by one or more nucleotide substitution(s), insertion(s) and/or deletion(s) without interfering with the functionality or activity of either the promoters, the open reading frame (ORF) or the 3′-regulatory region such as terminators or other 3′ regulatory regions which are located away from the ORF. It is furthermore possible that the activity of the promoters is increased by modification of their sequence, or that they are replaced completely by more active promoters, even promoters from heterologous organisms. For expression in plants, the nucleic acid molecule must, as described above, be linked operably to or comprise a suitable promoter which expresses the gene at the right point in time and with the required spatial expression pattern.

[0068] For the identification of functionally equivalent promoters, the promoter strength and/or expression pattern of a candidate promoter may be analysed for example by operably linking the promoter to a reporter gene and assaying the expression level and pattern of the reporter gene in various tissues of the plant. Suitable well-known reporter genes include for example beta-glucuronidase or beta-galactosidase. The promoter activity is assayed by measuring the enzymatic activity of the beta-glucuronidase or beta-galactosidase. The promoter strength and/or expression pattern may then be compared to that of a reference promoter (such as the one used in the methods of the present invention). Alternatively, promoter strength may be assayed by quantifying mRNA levels or by comparing mRNA levels of the nucleic acid used in the methods of the present invention, with mRNA levels of housekeeping genes such as 18S rRNA, using methods known in the art, such as Northern blotting with densitometric analysis of autoradiograms, quantitative real-time PCR or RT-PCR (Heid et al., 1996 Genome Methods 6: 986-994). Generally by “weak promoter” is intended a promoter that drives expression of a coding sequence at a low level. By “low level” is intended at levels of about 1/10,000 transcripts to about 1/100,000 transcripts, to about 1/500,0000 transcripts per cell. Conversely, a “strong promoter” drives expression of a coding sequence at high level, or at about 1/10 transcripts to about 1/100 transcripts to about 1/1000 transcripts per cell. Generally, by “medium strength promoter” is intended a promoter that drives expression of a coding sequence at a level that is in all instances below that obtained under the control of a 35S CaMV promoter.

### Operably Linked

[0069] The term “operably linked” as used herein refers to a functional linkage between the promoter sequence and the gene of interest, such that the promoter sequence is able to initiate transcription of the gene of interest.

### Constitutive Promoter

[0070] A “constitutive promoter” refers to a promoter that is transcriptionally active during most, but not necessarily all, phases of growth and development and under most environmental conditions, in at least one cell, tissue or organ. Table 2a below gives examples of constitutive promoters.

TABLE 2a
Examples of constitutive promoters

| Gene Source | Reference |
|---|---|
| Actin | McElroy et al, Plant Cell, 2: 163-171, 1990 |
| HMGP | WO 2004/070039 |
| CAMV 35S | Odell et al, Nature, 313: 810-812, 1985 |
| CaMV 19S | Nilsson et al., Physiol. Plant. 100: 456-462, 1997 |
| GOS2 | de Pater et al, Plant J Nov; 2(6): 837-44, 1992, WO 2004/065596 |
| Ubiquitin | Christensen et al, Plant Mol. Biol. 18: 675-689, 1992 |
| Rice cyclophilin | Buchholz et al, Plant Mol Biol. 25(5): 837-43, 1994 |
| Maize H3 histone | Lepetit et al, Mol. Gen. Genet. 231: 276-285, 1992 |
| Alfalfa H3 histone | Wu et al. Plant Mol. Biol. 11: 641-649, 1988 |
| Actin 2 | An et al, Plant J. 10(1); 107-121, 1996 |
| 34S FMV | Sanger et al., Plant. Mol. Biol., 14, 1990: 433-443 |
| Rubisco small subunit | U.S. Pat. No. 4,962,028 |
| OCS | Leisner (1988) Proc Natl Acad Sci USA 85(5): 2553 |
| SAD1 | Jain et al., Crop Science, 39 (6), 1999: 1696 |
| SAD2 | Jain et al., Crop Science, 39 (6), 1999: 1696 |
| Nos | Shaw et al. (1984) Nucleic Acids Res. 12(20): 7831-7846 |
| V-ATPase | WO 01/14572 |
| Super promoter | WO 95/14098 |
| G-box proteins | WO 94/12015 |

### Ubiquitous Promoter

[0071] A ubiquitous promoter is active in substantially all tissues or cells of an organism.

### Developmentally-Regulated Promoter

[0072] A developmentally-regulated promoter is active during certain developmental stages or in parts of the plant that undergo developmental changes.

### Inducible Promoter

[0073] An inducible promoter has induced or increased transcription initiation in response to a chemical (for a review see Gatz 1997, Annu. Rev. Plant Physiol. Plant Mol. Biol., 48:89-108), environmental or physical stimulus, or may be “stress-inducible”, i.e. activated when a plant is exposed to various stress conditions, or a “pathogen-inducible” i.e. activated when a plant is exposed to exposure to various pathogens.

### Organ-Specific/Tissue-Specific Promoter

[0074] An organ-specific or tissue-specific promoter is one that is capable of preferentially initiating transcription in certain organs or tissues, such as the leaves, roots, seed tissue etc. For example, a “root-specific promoter” is a promoter that is transcriptionally active predominantly in plant roots, substantially to the exclusion of any other parts of a plant, whilst still allowing for any leaky expression in these other plant parts. Promoters able to initiate transcription in certain cells only are referred to herein as “cell-specific”.

[0075] Examples of root-specific promoters are listed in Table 2b below:

TABLE 2b
Examples of root-specific promoters

| Gene Source | Reference |
|---|---|
| RCc3 | Plant Mol Biol. 1995 January; 27(2): 237-48 |
| Arabidopsis PHT1 | Kovama et al., 2005; |
| | Mudge et al. (2002, Plant J. 31: 341) |
| Medicago phosphate transporter | Xiao et al., 2006 |
| Arabidopsis Pyk10 | Nitz et al. (2001) Plant Sci 161(2): 337-346 |
| root-expressible genes | Tingey et al., EMBO J. 6: 1, 1987. |
| tobacco auxin-inducible gene | Van der Zaal et al., Plant Mol. Biol. 16, 983, 1991. |
| β-tubulin | Oppenheimer, et al., Gene 63: 87, 1988. |
| tobacco root-specific genes | Conkling, et al., Plant Physiol. 93: 1203, 1990. |
| B. napus G1-3b gene | U.S. Pat. No. 5,401,836 |
| SbPRP1 | Suzuki et al., Plant Mol. Biol. 21: 109-119, 1993. |
| LRX1 | Baumberger et al. 2001, Genes & Dev. 15: 1128 |
| BTG-26 Brassica napus | US 20050044585 |
| LeAMT1 (tomato) | Lauter et al. (1996, PNAS 3: 8139) |
| The LeNRT1-1 (tomato) | Lauter et al. (1996, PNAS 3: 8139) |
| class I patatin gene (potato) | Liu et al., Plant Mol. Biol. 153: 386-395, 1991. |
| KDC1 (Daucus carota) | Downey et al. (2000, J. Biol. Chem. 275: 39420) |
| TobRB7 gene | W Song (1997) PhD Thesis, North |
| | Carolina State University, Raleigh, NC USA |
| OsRAB5a (rice) | Wang et al. 2002, Plant Sci. 163: 273 |
| ALF5 (Arabidopsis) | Diener et al. (2001, Plant Cell 13: 1625) |
| NRT2; 1Np (N. plumbaginifolia) | Quesada et al. (1997, Plant Mol. Biol. 34: 265) |

[0076] A seed-specific promoter is transcriptionally active predominantly in seed tissue, but not necessarily exclusively in seed tissue (in cases of leaky expression). The seed-specific promoter may be active during seed development and/or during germination. The seed specific promoter may be an endosperm and/or aleurone and/or embryo specific. Examples of seed-specific promoters are shown in Table 2c to 2f below. Further examples of seed-specific promoters are given in Qing Qu and Takaiwa (Plant Biotechnol. J. 2, 113-125, 2004), which disclosure is incorporated by reference herein as if fully set forth.

TABLE 2c
Examples of seed-specific promoters

| Gene source | Reference |
|---|---|
| seed-specific genes | Simon et al., Plant Mol. Biol. 5: 191, 1985; |
| | Scofield et al., J. Biol. Chem. 262: 12202, 1987.; |
| | Baszczynski et al., Plant Mol. Biol. 14: 633, 1990. |
| Brazil Nut albumin | Pearson et al., Plant Mol. Biol. 18: 235-245, 1992. |
| legumin | Ellis et al., Plant Mol. Biol. 10: 203-214, 1988. |
| glutelin (rice) | Takaiwa et al., Mol. Gen. Genet. 208: 15-22, 1986; |
| | Takaiwa et al., FEBS Letts. 221: 43-47, 1987. |
| zein | Matzke et al Plant Mol Biol, 14(3): 323-32 1990 |
| napA | Stalberg et al, Planta 199: 515-519, 1996. |
| wheat LMW and HMW glutenin-1 | Mol Gen Genet 216: 81-90, 1989; NAR 17: 461-2, 1989 |
| wheat SPA | Albani et al, Plant Cell, 9: 171-184, 1997 |
| wheat α, β, γ-gliadins | EMBO J. 3: 1409-15, 1984 |
| barley Itr1 promoter | Diaz et al. (1995) Mol Gen Genet 248(5): 592-8 |
| barley B1, C, D, hordein | Theor Appl Gen 98: 1253-62, 1999; Plant J |
| | 4: 343-55, 1993; Mol Gen Genet 250: 750-60, 1996 |
| barley DOF | Mena et al, The Plant Journal, 116(1): 53-62, 1998 |
| blz2 | EP99106056.7 |
| synthetic promoter | Vicente-Carbajosa et al., Plant J. 13: 629-640, 1998. |
| rice prolamin NRP33 | Wu et al, Plant Cell Physiology 39(8) 885-889, 1998 |
| rice a-globulin Glb-1 | Wu et al, Plant Cell Physiology 39(8) 885-889, 1998 |
| rice OSH1 | Sato et al, Proc. Natl. Acad. Sci. USA, 93: |
| | 8117-8122, 1996 |
| rice α-globulin REB/OHP-1 | Nakase et al. Plant Mol. Biol. 33: 513-522, 1997 |
| rice ADP-glucose pyrophos- | Trans Res 6: 157-68, 1997 |
| phorylase | |
| maize ESR gene family | Plant J 12: 235-46, 1997 |
| sorghum α-kafirin | DeRose et al., Plant Mol. Biol 32: 1029-35, 1996 |
| KNOX | Postma-Haarsma et al, Plant Mol. Biol. 39: 257-71, 1999 |
| rice oleosin | Wu et al, J. Biochem. 123: 386, 1998 |
| sunflower oleosin | Cummins et al., Plant Mol. Biol. 19: 873-876, 1992 |
| PRO0117, putative rice 40S | WO 2004/070039 |
| ribosomal protein | |
| PRO0136, rice alanine | unpublished |
| aminotransferase | |
| PRO0147, trypsin inhibitor ITR1 | unpublished |
| (barley) | |
| PRO0151, rice WSI18 | WO 2004/070039 |
| PRO0175, rice RAB21 | WO 2004/070039 |
| PRO005 | WO 2004/070039 |
| PRO0095 | WO 2004/070039 |
| α-amylase (Amy32b) | Lanahan et al, Plant Cell 4: 203-211, 1992; Skriver et al, |
| | Proc Natl Acad Sci USA 88: 7266-7270, 1991 |
| cathepsin β-like gene | Cejudo et al, Plant Mol Biol 20: 849-856, 1992 |
| Barley Ltp2 | Kalla et al., Plant J. 6: 849-60, 1994 |
| Chi26 | Leah et al., Plant J. 4: 579-89, 1994 |
| Maize B-Peru | Selinger et al., Genetics 149; 1125-38, 1998 |

TABLE 2d
examples of endosperm-specific promoters

| Gene source | Reference |
|---|---|
| glutelin (rice) | Takaiwa et al. (1986) Mol Gen Genet 208: 15-22; |
| | Takaiwa et al. (1987) FEBS Letts. 221: 43-47 |
| zein | Matzke et al., (1990) Plant Mol Biol 14(3): 323-32 |
| wheat LMW and HMW glutenin-1 | Colot et al. (1989) Mol Gen Genet 216: 81-90, |
| | Anderson et al. (1989) NAR 17: 461-2 |
| wheat SPA | Albani et al. (1997) Plant Cell 9: 171-184 |
| wheat gliadins | Rafalski et al. (1984) EMBO 3: 1409-15 |
| barley Itr1 promoter | Diaz et al. (1995) Mol Gen Genet 248(5): 592-8 |
| barley B1, C, D, hordein | Cho et al. (1999) Theor Appl Genet 98: 1253-62; |
| | Muller et al. (1993) Plant J 4: 343-55; |
| | Sorenson et al. (1996) Mol Gen Genet 250: 750-60 |
| barley DOF | Mena et al, (1998) Plant J 116(1): 53-62 |
| blz2 | Onate et al. (1999) J Biol Chem 274(14): 9175-82 |
| Synthetic promoter | Vicente-Carbajosa et al. (1998) Plant J 13: 629-640 |
| rice prolamin NRP33 | Wu et al, (1998) Plant Cell Physiol 39(8) 885-889 |
| rice globulin Glb-1 | Wu et al. (1998) Plant Cell Physiol 39(8) 885-889 |
| rice globulin REB/OHP-1 | Nakase et al. (1997) Plant Molec Biol 33: 513-522 |
| rice ADP-glucose pyrophosphorylase | Russell et al. (1997) Trans Res 6: 157-68 |
| maize ESR gene family | Opsahl-Ferstad et al. (1997) Plant J 12: 235-46 |
| sorghum kafirin | DeRose et al. (1996) Plant Mol Biol 32: 1029-35 |

TABLE 2e
Examples of embryo specific promoters:

| Gene source | Reference |
|---|---|
| rice OSH1 | Sato et al, Proc. Natl. Acad. Sci. USA, 93: |
| | 8117-8122, 1996 |
| KNOX | Postma-Haarsma et al, Plant Mol. Biol. 39: |
| | 257-71, 1999 |
| PRO0151 | WO 2004/070039 |
| PRO0175 | WO 2004/070039 |
| PRO005 | WO 2004/070039 |
| PRO0095 | WO 2004/070039 |

TABLE 2f
Examples of aleurone-specific promoters:

| Gene source | Reference |
|---|---|
| α-amylase (Amy32b) | Lanahan et al, Plant Cell 4: 203-211, 1992; |
| | Skriver et al, Proc Natl Acad Sci USA 88: |
| | 7266-7270, 1991 |
| cathepsin β-like gene | Cejudo et al, Plant Mol Biol 20: 849-856, 1992 |
| Barley Ltp2 | Kalla et al., Plant J. 6: 849-60, 1994 |
| Chi26 | Leah et al., Plant J. 4: 579-89, 1994 |
| Maize B-Peru | Selinger et al., Genetics 149; 1125-38, 1998 |

[0077] A green tissue-specific promoter as defined herein is a promoter that is transcriptionally active predominantly in green tissue, substantially to the exclusion of any other parts of a plant, whilst still allowing for any leaky expression in these other plant parts.

[0078] Examples of green tissue-specific promoters which may be used to perform the methods of the invention are shown in Table 2g below.

TABLE 2g
Examples of green tissue-specific promoters

| Gene | Expression | Reference |
|---|---|---|
| Maize Orthophosphate dikinase | Leaf specific | Fukavama et al., 2001 |
| Maize Phosphoenolpyruvate | Leaf specific | Kausch et al.,2001 |
| carboxylase | | |
| Rice Phosphoenolpyruvate | Leaf specific | Liu et al., 2003 |
| carboxylase | | |
| Rice small subunit Rubisco | Leaf specific | Nomura et al., 2000 |
| rice beta expansin EXBP9 | Shoot specific | WO 2004/070039 |
| Pigeonpea small subunit Rubisco | Leaf specific | Panguluri et al., 2005 |
| Pea RBCS3A | Leaf specific | |

[0079] Another example of a tissue-specific promoter is a meristem-specific promoter, which is transcriptionally active predominantly in meristematic tissue, substantially to the exclusion of any other parts of a plant, whilst still allowing for any leaky expression in these other plant parts. Examples of green meristem-specific promoters which may be used to perform the methods of the invention are shown in Table 2h below.

TABLE 2h
Examples of meristem-specific promoters

| Gene source | Expression pattern | Reference |
|---|---|---|
| rice OSH1 | Shoot apical meristem, | Sato et al. (1996) |
| | from embryo globular | Proc. Natl. Acad. Sci. |
| | stage to seedling stage | USA, 93: 8117-8122 |
| Rice | Meristem specific | BAD87835.1 |
| metallothionein | | |
| WAK1 & WAK2 | Shoot and root apical | Wagner & Kohorn (2001) |
| | meristems, and in expan- | Plant Cell |
| | ding leaves and sepals | 13(2): 303-318 |

### Terminator

[0080] The term “terminator” encompasses a control sequence which is a DNA sequence at the end of a transcriptional unit which signals 3′ processing and polyadenylation of a primary transcript and termination of transcription. The terminator can be derived from the natural gene, from a variety of other plant genes, or from T-DNA. The terminator to be added may be derived from, for example, the nopaline synthase or octopine synthase genes, or alternatively from another plant gene, or less preferably from any other eukaryotic gene.

### Modulation

[0081] The term “modulation” means in relation to expression or gene expression, a process in which the expression level is changed by said gene expression in comparison to the control plant, the expression level may be increased or decreased. The original, unmodulated expression may be of any kind of expression of a structural RNA (rRNA, tRNA) or mRNA with subsequent translation. The term “modulating the activity” shall mean any change of the expression of the inventive nucleic acid sequences or encoded proteins, which leads to increased yield and/or increased growth of the plants.

[0082] Expression

[0083] The term “expression” or “gene expression” means the transcription of a specific gene or specific genes or specific genetic construct. The term “expression” or “gene expression” in particular means the transcription of a gene or genes or genetic construct into structural RNA (rRNA, tRNA) or mRNA with or without subsequent translation of the latter into a protein. The process includes transcription of DNA and processing of the resulting mRNA product.

### Increased Expression/Overexpression

[0084] The term “increased expression” or “overexpression” as used herein means any form of expression that is additional to the original wild-type expression level.

[0085] Methods for increasing expression of genes or gene products are well documented in the art and include, for example, overexpression driven by appropriate promoters, the use of transcription enhancers or translation enhancers. Isolated nucleic acids which serve as promoter or enhancer elements may be introduced in an appropriate position (typically upstream) of a non-heterologous form of a polynucleotide so as to upregulate expression of a nucleic acid encoding the polypeptide of interest. For example, endogenous promoters may be altered in vivo by mutation, deletion, and/or substitution (see, Kmiec, U.S. Pat. No. 5,565,350; Zarling et al., WO9322443), or isolated promoters may be introduced into a plant cell in the proper orientation and distance from a gene of the present invention so as to control the expression of the gene.

[0086] If polypeptide expression is desired, it is generally desirable to include a polyadenylation region at the 3′-end of a polynucleotide coding region. The polyadenylation region can be derived from the natural gene, from a variety of other plant genes, or from T-DNA. The 3′ end sequence to be added may be derived from, for example, the nopaline synthase or octopine synthase genes, or alternatively from another plant gene, or less preferably from any other eukaryotic gene.

[0087] An intron sequence may also be added to the 5′ untranslated region (UTR) or the coding sequence of the partial coding sequence to increase the amount of the mature message that accumulates in the cytosol. Inclusion of a spliceable intron in the transcription unit in both plant and animal expression constructs has been shown to increase gene expression at both the mRNA and protein levels up to 1000-fold (Buchman and Berg (1988) Mol. Cell biol. 8: 4395-4405; Callis et al. (1987) Genes Dev 1:1183-1200). Such intron enhancement of gene expression is typically greatest when placed near the 5′ end of the transcription unit. Use of the maize introns Adh1-S intron 1, 2, and 6, the Bronze-1 intron are known in the art. For general information see: The Maize Handbook, Chapter 116, Freeling and Walbot, Eds., Springer, N.Y. (1994).

### Endogenous Gene

[0088] Reference herein to an “endogenous” gene not only refers to the gene in question as found in a plant in its natural form (i.e., without there being any human intervention), but also refers to that same gene (or a substantially homologous nucleic acid/gene) in an isolated form subsequently (re)introduced into a plant (a transgene). For example, a transgenic plant containing such a transgene may encounter a substantial reduction of the transgene expression and/or substantial reduction of expression of the endogenous gene. The isolated gene may be isolated from an organism or may be manmade, for example by chemical synthesis.

### Decreased Expression

[0089] Reference herein to “decreased expression” or “reduction or substantial elimination” of expression is taken to mean a decrease in endogenous gene expression and/or polypeptide levels and/or polypeptide activity relative to control plants. The reduction or substantial elimination is in increasing order of preference at least 10%, 20%, 30%, 40% or 50%, 60%, 70%, 80%, 85%, 90%, or 95%, 96%, 97%, 98%, 99% or more reduced compared to that of control plants. Methods for decreasing expression are known in the art and the skilled person would readily be able to adapt the known methods for silencing so as to achieve reduction of expression of an endogenous gene in a whole plant or in parts thereof through the use of an appropriate promoter, for example.

[0090] For the reduction or substantial elimination of expression an endogenous gene in a plant, a sufficient length of substantially contiguous nucleotides of a nucleic acid sequence is required. In order to perform gene silencing, this may be as little as 20, 19, 18, 17, 16, 15, 14, 13, 12, 11, 10 or fewer nucleotides, alternatively this may be as much as the entire gene (including the 5′ and/or 3′ UTR, either in part or in whole). The stretch of substantially contiguous nucleotides may be derived from the nucleic acid encoding the protein of interest (target gene), or from any nucleic acid capable of encoding an orthologue, paralogue or homologue of the protein of interest. Preferably, the stretch of substantially contiguous nucleotides is capable of forming hydrogen bonds with the target gene (either sense or antisense strand), more preferably, the stretch of substantially contiguous nucleotides has, in increasing order of preference, 50%, 60%, 70%, 80%, 85%, 90%, 95%, 96%, 97%, 98%, 99%, 100% sequence identity to the target gene (either sense or antisense strand). A nucleic acid sequence encoding a (functional) polypeptide is not a requirement for the various methods discussed herein for the reduction or substantial elimination of expression of an endogenous gene.

[0091] This reduction or substantial elimination of expression may be achieved using routine tools and techniques. A preferred method for the reduction or substantial elimination of endogenous gene expression is by introducing and expressing in a plant a genetic construct into which the nucleic acid (in this case a stretch of substantially contiguous nucleotides derived from the gene of interest, or from any nucleic acid capable of encoding an orthologue, paralogue or homologue of any one of the protein of interest) is cloned as an inverted repeat (in part or completely), separated by a spacer (non-coding DNA).

[0092] In such a preferred method, expression of the endogenous gene is reduced or substantially eliminated through RNA-mediated silencing using an inverted repeat of a nucleic acid or a part thereof (in this case a stretch of substantially contiguous nucleotides derived from the gene of interest, or from any nucleic acid capable of encoding an orthologue, paralogue or homologue of the protein of interest), preferably capable of forming a hairpin structure. The inverted repeat is cloned in an expression vector comprising control sequences. A non-coding DNA nucleic acid sequence (a spacer, for example a matrix attachment region fragment (MAR), an intron, a polylinker, etc.) is located between the two inverted nucleic acids forming the inverted repeat. After transcription of the inverted repeat, a chimeric RNA with a self-complementary structure is formed (partial or complete). This double-stranded RNA structure is referred to as the hairpin RNA (hpRNA). The hpRNA is processed by the plant into siRNAs that are incorporated into an RNA-induced silencing complex (RISC). The RISC further cleaves the mRNA transcripts, thereby substantially reducing the number of mRNA transcripts to be translated into polypeptides. For further general details see for example, Grierson et al. (1998) WO 98/53083; Waterhouse et al. (1999) WO 99/53050).

[0093] Performance of the methods of the invention does not rely on introducing and expressing in a plant a genetic construct into which the nucleic acid is cloned as an inverted repeat, but any one or more of several well-known “gene silencing” methods may be used to achieve the same effects.

[0094] One such method for the reduction of endogenous gene expression is RNA-mediated silencing of gene expression (downregulation). Silencing in this case is triggered in a plant by a double stranded RNA sequence (dsRNA) that is substantially similar to the target endogenous gene. This dsRNA is further processed by the plant into about 20 to about 26 nucleotides called short interfering RNAs (siRNAs). The siRNAs are incorporated into an RNA-induced silencing complex (RISC) that cleaves the mRNA transcript of the endogenous target gene, thereby substantially reducing the number of mRNA transcripts to be translated into a polypeptide. Preferably, the double stranded RNA sequence corresponds to a target gene.

[0095] Another example of an RNA silencing method involves the introduction of nucleic acid sequences or parts thereof (in this case a stretch of substantially contiguous nucleotides derived from the gene of interest, or from any nucleic acid capable of encoding an orthologue, paralogue or homologue of the protein of interest) in a sense orientation into a plant. “Sense orientation” refers to a DNA sequence that is homologous to an mRNA transcript thereof. Introduced into a plant would therefore be at least one copy of the nucleic acid sequence. The additional nucleic acid sequence will reduce expression of the endogenous gene, giving rise to a phenomenon known as co-suppression. The reduction of gene expression will be more pronounced if several additional copies of a nucleic acid sequence are introduced into the plant, as there is a positive correlation between high transcript levels and the triggering of co-suppression.

[0096] Another example of an RNA silencing method involves the use of antisense nucleic acid sequences. An “antisense” nucleic acid sequence comprises a nucleotide sequence that is complementary to a “sense” nucleic acid sequence encoding a protein, i.e. complementary to the coding strand of a double-stranded cDNA molecule or complementary to an mRNA transcript sequence. The antisense nucleic acid sequence is preferably complementary to the endogenous gene to be silenced. The complementarity may be located in the “coding region” and/or in the “non-coding region” of a gene. The term “coding region” refers to a region of the nucleotide sequence comprising codons that are translated into amino acid residues. The term “non-coding region” refers to 5′ and 3′ sequences that flank the coding region that are transcribed but not translated into amino acids (also referred to as 5′ and 3′ untranslated regions).

[0097] Antisense nucleic acid sequences can be designed according to the rules of Watson and Crick base pairing. The antisense nucleic acid sequence may be complementary to the entire nucleic acid sequence (in this case a stretch of substantially contiguous nucleotides derived from the gene of interest, or from any nucleic acid capable of encoding an orthologue, paralogue or homologue of the protein of interest), but may also be an oligonucleotide that is antisense to only a part of the nucleic acid sequence (including the mRNA 5′ and 3′ UTR). For example, the antisense oligonucleotide sequence may be complementary to the region surrounding the translation start site of an mRNA transcript encoding a polypeptide. The length of a suitable antisense oligonucleotide sequence is known in the art and may start from about 50, 45, 40, 35, 30, 25, 20, 15 or 10 nucleotides in length or less. An antisense nucleic acid sequence according to the invention may be constructed using chemical synthesis and enzymatic ligation reactions using methods known in the art. For example, an antisense nucleic acid sequence (e.g., an antisense oligonucleotide sequence) may be chemically synthesized using naturally occurring nucleotides or variously modified nucleotides designed to increase the biological stability of the molecules or to increase the physical stability of the duplex formed between the antisense and sense nucleic acid sequences, e.g., phosphorothioate derivatives and acridine substituted nucleotides may be used. Examples of modified nucleotides that may be used to generate the antisense nucleic acid sequences are well known in the art. Known nucleotide modifications include methylation, cyclization and ‘caps’ and substitution of one or more of the naturally occurring nucleotides with an analogue such as inosine. Other modifications of nucleotides are well known in the art.

[0098] The antisense nucleic acid sequence can be produced biologically using an expression vector into which a nucleic acid sequence has been subcloned in an antisense orientation (i.e., RNA transcribed from the inserted nucleic acid will be of an antisense orientation to a target nucleic acid of interest). Preferably, production of antisense nucleic acid sequences in plants occurs by means of a stably integrated nucleic acid construct comprising a promoter, an operably linked antisense oligonucleotide, and a terminator.

[0099] The nucleic acid molecules used for silencing in the methods of the invention (whether introduced into a plant or generated in situ) hybridize with or bind to mRNA transcripts and/or genomic DNA encoding a polypeptide to thereby inhibit expression of the protein, e.g., by inhibiting transcription and/or translation. The hybridization can be by conventional nucleotide complementarity to form a stable duplex, or, for example, in the case of an antisense nucleic acid sequence which binds to DNA duplexes, through specific interactions in the major groove of the double helix. Antisense nucleic acid sequences may be introduced into a plant by transformation or direct injection at a specific tissue site. Alternatively, antisense nucleic acid sequences can be modified to target selected cells and then administered systemically. For example, for systemic administration, antisense nucleic acid sequences can be modified such that they specifically bind to receptors or antigens expressed on a selected cell surface, e.g., by linking the antisense nucleic acid sequence to peptides or antibodies which bind to cell surface receptors or antigens. The antisense nucleic acid sequences can also be delivered to cells using the vectors described herein.

[0100] According to a further aspect, the antisense nucleic acid sequence is an a-anomeric nucleic acid sequence. An a-anomeric nucleic acid sequence forms specific double-stranded hybrids with complementary RNA in which, contrary to the usual b-units, the strands run parallel to each other (Gaultier et al. (1987) Nucl Ac Res 15: 6625-6641). The antisense nucleic acid sequence may also comprise a 2′-o-methylribonucleotide (Inoue et al. (1987) Nucl Ac Res 15, 6131-6148) or a chimeric RNA-DNA analogue (Inoue et al. (1987) FEBS Lett. 215, 327-330).

[0101] The reduction or substantial elimination of endogenous gene expression may also be performed using ribozymes. Ribozymes are catalytic RNA molecules with ribonuclease activity that are capable of cleaving a single-stranded nucleic acid sequence, such as an mRNA, to which they have a complementary region. Thus, ribozymes (e.g., hammerhead ribozymes (described in Haselhoff and Gerlach (1988) Nature 334, 585-591) can be used to catalytically cleave mRNA transcripts encoding a polypeptide, thereby substantially reducing the number of mRNA transcripts to be translated into a polypeptide. A ribozyme having specificity for a nucleic acid sequence can be designed (see for example: Cech et al. U.S. Pat. No. 4,987,071; and Cech et al. U.S. Pat. No. 5,116,742). Alternatively, mRNA transcripts corresponding to a nucleic acid sequence can be used to select a catalytic RNA having a specific ribonuclease activity from a pool of RNA molecules (Bartel and Szostak (1993) Science 261, 1411-1418). The use of ribozymes for gene silencing in plants is known in the art (e.g., Atkins et al. (1994) WO 94/00012; Lenne et al. (1995) WO 95/03404; Lutziger et al. (2000) WO 00/00619; Prinsen et al. (1997) WO 97/13865 and Scott et al. (1997) WO 97/38116).

[0102] Gene silencing may also be achieved by insertion mutagenesis (for example, T-DNA insertion or transposon insertion) or by strategies as described by, among others, Angell and Baulcombe ((1999) Plant J 20(3): 357-62), (Amplicon VIGS WO 98/36083), or Baulcombe (WO 99/15682).

[0103] Gene silencing may also occur if there is a mutation on an endogenous gene and/or a mutation on an isolated gene/nucleic acid subsequently introduced into a plant. The reduction or substantial elimination may be caused by a non-functional polypeptide. For example, the polypeptide may bind to various interacting proteins; one or more mutation(s) and/or truncation(s) may therefore provide for a polypeptide that is still able to bind interacting proteins (such as receptor proteins) but that cannot exhibit its normal function (such as signalling ligand).

[0104] A further approach to gene silencing is by targeting nucleic acid sequences complementary to the regulatory region of the gene (e.g., the promoter and/or enhancers) to form triple helical structures that prevent transcription of the gene in target cells. See Helene, C., Anticancer Drug Res. 6, 569-84, 1991; Helene et al., Ann. N.Y. Acad. Sci. 660, 27-36 1992; and Maher, L. J. Bioassays 14, 807-15, 1992.

[0105] Other methods, such as the use of antibodies directed to an endogenous polypeptide for inhibiting its function in planta, or interference in the signalling pathway in which a polypeptide is involved, will be well known to the skilled man. In particular, it can be envisaged that manmade molecules may be useful for inhibiting the biological function of a target polypeptide, or for interfering with the signalling pathway in which the target polypeptide is involved.

[0106] Alternatively, a screening program may be set up to identify in a plant population natural variants of a gene, which variants encode polypeptides with reduced activity. Such natural variants may also be used for example, to perform homologous recombination.

[0107] Artificial and/or natural microRNAs (miRNAs) may be used to knock out gene expression and/or mRNA translation. Endogenous miRNAs are single stranded small RNAs of typically 19-24 nucleotides long. They function primarily to regulate gene expression and/or mRNA translation. Most plant microRNAs (miRNAs) have perfect or near-perfect complementarity with their target sequences. However, there are natural targets with up to five mismatches. They are processed from longer non-coding RNAs with characteristic fold-back structures by double-strand specific RNases of the Dicer family. Upon processing, they are incorporated in the RNA-induced silencing complex (RISC) by binding to its main component, an Argonaute protein. mRNAs serve as the specificity components of RISC, since they base-pair to target nucleic acids, mostly mRNAs, in the cytoplasm. Subsequent regulatory events include target mRNA cleavage and destruction and/or translational inhibition. Effects of miRNA overexpression are thus often reflected in decreased mRNA levels of target genes.

[0108] Artificial microRNAs (amiRNAs), which are typically 21 nucleotides in length, can be genetically engineered specifically to negatively regulate gene expression of single or multiple genes of interest. Determinants of plant microRNA target selection are well known in the art. Empirical parameters for target recognition have been defined and can be used to aid in the design of specific amiRNAs, (Schwab et al., Dev. Cell 8, 517-527, 2005). Convenient tools for design and generation of amiRNAs and their precursors are also available to the public (Schwab et al., Plant Cell 18, 1121-1133, 2006).

[0109] For optimal performance, the gene silencing techniques used for reducing expression in a plant of an endogenous gene requires the use of nucleic acid sequences from monocotyledonous plants for transformation of monocotyledonous plants, and from dicotyledonous plants for transformation of dicotyledonous plants. Preferably, a nucleic acid sequence from any given plant species is introduced into that same species. For example, a nucleic acid sequence from rice is transformed into a rice plant. However, it is not an absolute requirement that the nucleic acid sequence to be introduced originates from the same plant species as the plant in which it will be introduced. It is sufficient that there is substantial homology between the endogenous target gene and the nucleic acid to be introduced.

[0110] Described above are examples of various methods for the reduction or substantial elimination of expression in a plant of an endogenous gene. A person skilled in the art would readily be able to adapt the aforementioned methods for silencing so as to achieve reduction of expression of an endogenous gene in a whole plant or in parts thereof through the use of an appropriate promoter, for example.

### Selectable Marker (Gene)/Reporter Gene

[0111] “Selectable marker”, “selectable marker gene” or “reporter gene” includes any gene that confers a phenotype on a cell in which it is expressed to facilitate the identification and/or selection of cells that are transfected or transformed with a nucleic acid construct of the invention. These marker genes enable the identification of a successful transfer of the nucleic acid molecules via a series of different principles. Suitable markers may be selected from markers that confer antibiotic or herbicide resistance, that introduce a new metabolic trait or that allow visual selection. Examples of selectable marker genes include genes conferring resistance to antibiotics (such as nptII that phosphorylates neomycin and kanamycin, or hpt, phosphorylating hygromycin, or genes conferring resistance to, for example, bleomycin, streptomycin, tetracyclin, chloramphenicol, ampicillin, gentamycin, geneticin (G418), spectinomycin or blasticidin), to herbicides (for example bar which provides resistance to Basta®; aroA or gox providing resistance against glyphosate, or the genes conferring resistance to, for example, imidazolinone, phosphinothricin or sulfonylurea), or genes that provide a metabolic trait (such as manA that allows plants to use mannose as sole carbon source or xylose isomerase for the utilisation of xylose, or antinutritive markers such as the resistance to 2-deoxyglucose). Expression of visual marker genes results in the formation of colour (for example β-glucuronidase, GUS or β-galactosidase with its coloured substrates, for example X-Gal), luminescence (such as the luciferin/luceferase system) or fluorescence (Green Fluorescent Protein, GFP, and derivatives thereof). This list represents only a small number of possible markers. The skilled worker is familiar with such markers. Different markers are preferred, depending on the organism and the selection method.

[0112] It is known that upon stable or transient integration of nucleic acids into plant cells, only a minority of the cells takes up the foreign DNA and, if desired, integrates it into its genome, depending on the expression vector used and the transfection technique used. To identify and select these integrants, a gene coding for a selectable marker (such as the ones described above) is usually introduced into the host cells together with the gene of interest. These markers can for example be used in mutants in which these genes are not functional by, for example, deletion by conventional methods. Furthermore, nucleic acid molecules encoding a selectable marker can be introduced into a host cell on the same vector that comprises the sequence encoding the polypeptides of the invention or used in the methods of the invention, or else in a separate vector. Cells which have been stably transfected with the introduced nucleic acid can be identified for example by selection (for example, cells which have integrated the selectable marker survive whereas the other cells die). The marker genes may be removed or excised from the transgenic cell once they are no longer needed. Techniques for marker gene removal are known in the art, useful techniques are described above in the definitions section.

[0113] Since the marker genes, particularly genes for resistance to antibiotics and herbicides, are no longer required or are undesired in the transgenic host cell once the nucleic acids have been introduced successfully, the process according to the invention for introducing the nucleic acids advantageously employs techniques which enable the removal or excision of these marker genes. One such a method is what is known as co-transformation. The co-transformation method employs two vectors simultaneously for the transformation, one vector bearing the nucleic acid according to the invention and a second bearing the marker gene(s). A large proportion of transformants receives or, in the case of plants, comprises (up to 40% or more of the transformants), both vectors. In case of transformation with Agrobacteria, the transformants usually receive only a part of the vector, i.e. the sequence flanked by the T-DNA, which usually represents the expression cassette. The marker genes can subsequently be removed from the transformed plant by performing crosses. In another method, marker genes integrated into a transposon are used for the transformation together with desired nucleic acid (known as the Ac/Ds technology). The transformants can be crossed with a transposase source or the transformants are transformed with a nucleic acid construct conferring expression of a transposase, transiently or stable. In some cases (approx. 10%), the transposon jumps out of the genome of the host cell once transformation has taken place successfully and is lost. In a further number of cases, the transposon jumps to a different location. In these cases the marker gene must be eliminated by performing crosses. In microbiology, techniques were developed which make possible, or facilitate, the detection of such events. A further advantageous method relies on what is known as recombination systems; whose advantage is that elimination by crossing can be dispensed with. The best-known system of this type is what is known as the Cre/lox system. Cre1 is a recombinase that removes the sequences located between the loxP sequences. If the marker gene is integrated between the loxP sequences, it is removed once transformation has taken place successfully, by expression of the recombinase. Further recombination systems are the HIN/HIX, FLP/FRT and REP/STB system (Tribble et al., J. Biol. Chem., 275, 2000: 22255-22267; Velmurugan et al., J. Cell Biol., 149, 2000: 553-566). A site-specific integration into the plant genome of the nucleic acid sequences according to the invention is possible. Naturally, these methods can also be applied to microorganisms such as yeast, fungi or bacteria.

### Transgenic/Transgene/Recombinant

[0114] For the purposes of the invention, “transgenic”, “transgene” or “recombinant” means with regard to, for example, a nucleic acid sequence, an expression cassette, gene construct or a vector comprising the nucleic acid sequence or an organism transformed with the nucleic acid sequences, expression cassettes or vectors according to the invention, all those constructions brought about by recombinant methods in which either

(a) the nucleic acid sequences encoding proteins useful in the methods of the invention, or
(b) genetic control sequence(s) which is operably linked with the nucleic acid sequence according to the invention, for example a promoter, or
(c) a) and b)
are not located in their natural genetic environment or have been modified by recombinant methods, it being possible for the modification to take the form of, for example, a substitution, addition, deletion, inversion or insertion of one or more nucleotide residues. The natural genetic environment is understood as meaning the natural genomic or chromosomal locus in the original plant or the presence in a genomic library. In the case of a genomic library, the natural genetic environment of the nucleic acid sequence is preferably retained, at least in part. The environment flanks the nucleic acid sequence at least on one side and has a sequence length of at least 50 bp, preferably at least 500 bp, especially preferably at least 1000 bp, most preferably at least 5000 bp. A naturally occurring expression cassette—for example the naturally occurring combination of the natural promoter of the nucleic acid sequences with the corresponding nucleic acid sequence encoding a polypeptide useful in the methods of the present invention, as defined above—becomes a transgenic expression cassette when this expression cassette is modified by non-natural, synthetic (“artificial”) methods such as, for example, mutagenic treatment. Suitable methods are described, for example, in U.S. Pat. No. 5,565,350 or WO 00/15815.

[0115] A transgenic plant for the purposes of the invention is thus understood as meaning, as above, that the nucleic acids used in the method of the invention are not at their natural locus in the genome of said plant, it being possible for the nucleic acids to be expressed homologously or heterologously. However, as mentioned, transgenic also means that, while the nucleic acids according to the invention or used in the inventive method are at their natural position in the genome of a plant, the sequence has been modified with regard to the natural sequence, and/or that the regulatory sequences of the natural sequences have been modified. Transgenic is preferably understood as meaning the expression of the nucleic acids according to the invention at an unnatural locus in the genome, i.e. homologous or, preferably, heterologous expression of the nucleic acids takes place. Preferred transgenic plants are mentioned herein.

### Transformation

[0116] The term “introduction” or “transformation” as referred to herein encompasses the transfer of an exogenous polynucleotide into a host cell, irrespective of the method used for transfer. Plant tissue capable of subsequent clonal propagation, whether by organogenesis or embryogenesis, may be transformed with a genetic construct of the present invention and a whole plant regenerated there from. The particular tissue chosen will vary depending on the clonal propagation systems available for, and best suited to, the particular species being transformed. Exemplary tissue targets include leaf disks, pollen, embryos, cotyledons, hypocotyls, megagametophytes, callus tissue, existing meristematic tissue (e.g., apical meristem, axillary buds, and root meristems), and induced meristem tissue (e.g., cotyledon meristem and hypocotyl meristem). The polynucleotide may be transiently or stably introduced into a host cell and may be maintained non-integrated, for example, as a plasmid. Alternatively, it may be integrated into the host genome. The resulting transformed plant cell may then be used to regenerate a transformed plant in a manner known to persons skilled in the art.

[0117] The transfer of foreign genes into the genome of a plant is called transformation. Transformation of plant species is now a fairly routine technique. Advantageously, any of several transformation methods may be used to introduce the gene of interest into a suitable ancestor cell. The methods described for the transformation and regeneration of plants from plant tissues or plant cells may be utilized for transient or for stable transformation. Transformation methods include the use of liposomes, electroporation, chemicals that increase free DNA uptake, injection of the DNA directly into the plant, particle gun bombardment, transformation using viruses or pollen and microprojection. Methods may be selected from the calcium/polyethylene glycol method for protoplasts (Krens, F. A. et al., (1982) Nature 296, 72-74; Negrutiu I et al. (1987) Plant Mol Biol 8: 363-373); electroporation of protoplasts (Shillito R. D. et al. (1985) Bio/Technol 3, 1099-1102); microinjection into plant material (Crossway A et al., (1986) Mol. Gen Genet 202: 179-185); DNA or RNA-coated particle bombardment (Klein T M et al., (1987) Nature 327: 70) infection with (non-integrative) viruses and the like. Transgenic plants, including transgenic crop plants, are preferably produced via Agrobacterium-mediated transformation. An advantageous transformation method is the transformation in planta. To this end, it is possible, for example, to allow the agrobacteria to act on plant seeds or to inoculate the plant meristem with agrobacteria. It has proved particularly expedient in accordance with the invention to allow a suspension of transformed agrobacteria to act on the intact plant or at least on the flower primordia. The plant is subsequently grown on until the seeds of the treated plant are obtained (Clough and Bent, Plant J. (1998) 16, 735-743). Methods for Agrobacterium-mediated transformation of rice include well known methods for rice transformation, such as those described in any of the following: European patent application EP 1198985 A1, Aldemita and Hodges (Planta 199: 612-617, 1996); Chan et al. (Plant Mol Biol 22 (3): 491-506, 1993), Hiei et al. (Plant J 6 (2): 271-282, 1994), which disclosures are incorporated by reference herein as if fully set forth. In the case of corn transformation, the preferred method is as described in either Ishida et al. (Nat. Biotechnol 14(6): 745-50, 1996) or Frame et al. (Plant Physiol 129(1): 13-22, 2002), which disclosures are incorporated by reference herein as if fully set forth. Said methods are further described by way of example in B. Jenes et al., Techniques for Gene Transfer, in: Transgenic Plants, Vol. 1, Engineering and Utilization, eds. S. D. Kung and R. Wu, Academic Press (1993) 128-143 and in Potrykus Annu. Rev. Plant Physiol. Plant Molec. Biol. 42 (1991) 205-225). The nucleic acids or the construct to be expressed is preferably cloned into a vector, which is suitable for transforming Agrobacterium tumefaciens, for example pBin19 (Bevan et al., Nucl. Acids Res. 12 (1984) 8711). Agrobacteria transformed by such a vector can then be used in known manner for the transformation of plants, such as plants used as a model, like Arabidopsis (Arabidopsis thaliana is within the scope of the present invention not considered as a crop plant), or crop plants such as, by way of example, tobacco plants, for example by immersing bruised leaves or chopped leaves in an agrobacterial solution and then culturing them in suitable media. The transformation of plants by means of Agrobacterium tumefaciens is described, for example, by Höfgen and Willmitzer in Nucl. Acid Res. (1988) 16, 9877 or is known inter alia from F. F. White, Vectors for Gene Transfer in Higher Plants; in Transgenic Plants, Vol. 1, Engineering and Utilization, eds. S. D. Kung and R. Wu, Academic Press, 1993, pp. 15-38.

[0118] In addition to the transformation of somatic cells, which then have to be regenerated into intact plants, it is also possible to transform the cells of plant meristems and in particular those cells which develop into gametes. In this case, the transformed gametes follow the natural plant development, giving rise to transgenic plants. Thus, for example, seeds of Arabidopsis are treated with agrobacteria and seeds are obtained from the developing plants of which a certain proportion is transformed and thus transgenic [Feldman, K A and Marks M D (1987). Mol Gen Genet 208:274-289; Feldmann K (1992). In: C Koncz, N-H Chua and J Shell, eds, Methods in Arabidopsis Research. Word Scientific, Singapore, pp. 274-289]. Alternative methods are based on the repeated removal of the inflorescences and incubation of the excision site in the center of the rosette with transformed agrobacteria, whereby transformed seeds can likewise be obtained at a later point in time (Chang (1994). Plant J. 5: 551-558; Katavic (1994). Mol Gen Genet, 245: 363-370). However, an especially effective method is the vacuum infiltration method with its modifications such as the “floral dip” method. In the case of vacuum infiltration of Arabidopsis, intact plants under reduced pressure are treated with an agrobacterial suspension [Bechthold, N (1993). C R Acad Sci Paris Life Sci, 316: 1194-1199], while in the case of the “floral dip” method the developing floral tissue is incubated briefly with a surfactant-treated agrobacterial suspension [Clough, S J and Bent A F (1998) The Plant J. 16, 735-743]. A certain proportion of transgenic seeds are harvested in both cases, and these seeds can be distinguished from non-transgenic seeds by growing under the above-described selective conditions. In addition the stable transformation of plastids is of advantages because plastids are inherited maternally is most crops reducing or eliminating the risk of transgene flow through pollen. The transformation of the chloroplast genome is generally achieved by a process which has been schematically displayed in Klaus et al., 2004 [Nature Biotechnology 22 (2), 225-229]. Briefly the sequences to be transformed are cloned together with a selectable marker gene between flanking sequences homologous to the chloroplast genome. These homologous flanking sequences direct site specific integration into the plastome. Plastidal transformation has been described for many different plant species and an overview is given in Bock (2001) Transgenic plastids in basic research and plant biotechnology. J Mol Biol. 2001 Sep. 21; 312 (3):425-38 or Maliga, P (2003) Progress towards commercialization of plastid transformation technology. Trends Biotechnol. 21, 20-28. Further biotechnological progress has recently been reported in form of marker free plastid transformants, which can be produced by a transient co-integrated maker gene (Klaus et al., 2004, Nature Biotechnology 22(2), 225-229).

### T-DNA Activation Tagging

[0119] T-DNA activation tagging (Hayashi et al. Science (1992) 1350-1353), involves insertion of T-DNA, usually containing a promoter (may also be a translation enhancer or an intron), in the genomic region of the gene of interest or 10 kb up- or downstream of the coding region of a gene in a configuration such that the promoter directs expression of the targeted gene. Typically, regulation of expression of the targeted gene by its natural promoter is disrupted and the gene falls under the control of the newly introduced promoter. The promoter is typically embedded in a T-DNA. This T-DNA is randomly inserted into the plant genome, for example, through Agrobacterium infection and leads to modified expression of genes near the inserted T-DNA. The resulting transgenic plants show dominant phenotypes due to modified expression of genes close to the introduced promoter.

### TILLING

[0120] The term “TILLING” is an abbreviation of “Targeted Induced Local Lesions In Genomes” and refers to a mutagenesis technology useful to generate and/or identify nucleic acids encoding proteins with modified expression and/or activity. TILLING also allows selection of plants carrying such mutant variants. These mutant variants may exhibit modified expression, either in strength or in location or in timing (if the mutations affect the promoter for example). These mutant variants may exhibit higher activity than that exhibited by the gene in its natural form. TILLING combines high-density mutagenesis with high-throughput screening methods. The steps typically followed in TILLING are: (a) EMS mutagenesis (Redei G P and Koncz C (1992) In Methods in Arabidopsis Research, Koncz C, Chua N H, Schell J, eds. Singapore, World Scientific Publishing Co, pp. 16-82; Feldmann et al., (1994) In Meyerowitz E M, Somerville C R, eds, Arabidopsis. Cold Spring Harbor Laboratory Press, Cold Spring Harbor, N.Y., pp 137-172; Lightner J and Caspar T (1998) In J Martinez-Zapater, J Salinas, eds, Methods on Molecular Biology, Vol. 82. Humana Press, Totowa, N.J., pp 91-104); (b) DNA preparation and pooling of individuals; (c) PCR amplification of a region of interest; (d) denaturation and annealing to allow formation of heteroduplexes; (e) DHPLC, where the presence of a heteroduplex in a pool is detected as an extra peak in the chromatogram; (f) identification of the mutant individual; and (g) sequencing of the mutant PCR product. Methods for TILLING are well known in the art (McCallum et al., (2000) Nat Biotechnol 18: 455-457; reviewed by Stemple (2004) Nat Rev Genet 5(2): 145-50).

### Homologous Recombination

[0121] Homologous recombination allows introduction in a genome of a selected nucleic acid at a defined selected position. Homologous recombination is a standard technology used routinely in biological sciences for lower organisms such as yeast or the moss Physcomitrella. Methods for performing homologous recombination in plants have been described not only for model plants (Offring a et al. (1990) EMBO J 9(10): 3077-84) but also for crop plants, for example rice (Terada et al. (2002) Nat Biotech 20(10): 1030-4; Iida and Terada (2004) Curr Opin Biotech 15(2): 132-8), and approaches exist that are generally applicable regardless of the target organism (Miller et al, Nature Biotechnol. 25, 778-785, 2007).

### Yield

[0122] The term “yield” in general means a measurable produce of economic value, typically related to a specified crop, to an area, and to a period of time. Individual plant parts directly contribute to yield based on their number, size and/or weight, or the actual yield is the yield per square meter for a crop and year, which is determined by dividing total production (includes both harvested and appraised production) by planted square meters. The term “yield” of a plant may relate to vegetative biomass (root and/or shoot biomass), to reproductive organs, and/or to propagules (such as seeds) of that plant.

### Early Vigour

[0123] “Early vigour” refers to active healthy well-balanced growth especially during early stages of plant growth, and may result from increased plant fitness due to, for example, the plants being better adapted to their environment (i.e. optimizing the use of energy resources and partitioning between shoot and root). Plants having early vigour also show increased seedling survival and a better establishment of the crop, which often results in highly uniform fields (with the crop growing in uniform manner, i.e. with the majority of plants reaching the various stages of development at substantially the same time), and often better and higher yield. Therefore, early vigour may be determined by measuring various factors, such as thousand kernel weight, percentage germination, percentage emergence, seedling growth, seedling height, root length, root and shoot biomass and many more.

### Increase/Improve/Enhance

[0124] The terms “increase”, “improve” or “enhance” are interchangeable and shall mean in the sense of the application in case of TCP1, TCP2, Epsin-like or SHR-encoding nucleic acids or TCP1, TCP2, Epsin-like or SHR-polypeptides at least a 3%, 4%, 5%, 6%, 7%, 8%, 9% or 10%, preferably at least 15% or 20%, more preferably 25%, 30%, 35% or 40% more yield and/or growth in comparison to control plants as defined herein and in case of IPPT-encoding nucleic acids or IPPT-polypeptides at least a 5%, 6%, 7%, 8%, 9%, or 10%, preferably at least 15% or 20%, more preferably 25%, 30%, 35% or 40% more yield and/or growth in comparison to control plants as defined herein.

### Seed Yield

[0125] Increased seed yield may manifest itself as one or more of the following: a) an increase in seed biomass (total seed weight) which may be on an individual seed basis and/or per plant and/or per square meter; b) increased number of flowers per panicle and/or per plant; c) increased number of (filled) seeds; d) increased seed filling rate (which is expressed as the ratio between the number of filled seeds divided by the total number of seeds); e) increased harvest index, which is expressed as a ratio of the yield of harvestable parts, such as seeds, divided by the total biomass; f) increased thousand kernel weight (TKW) and g) increased number of primary panicles, which is extrapolated from the number of filled seeds counted and their total weight. An increased TKW may result from an increased seed size and/or seed weight, and may also result from an increase in embryo and/or endosperm size.

[0126] An increase in seed yield may also be manifested as an increase in seed size and/or seed volume. Furthermore, an increase in seed yield may also manifest itself as an increase in seed area and/or seed length and/or seed width and/or seed perimeter. Increased yield may also result in modified architecture, or may occur because of modified architecture.

### Greenness Index

[0127] The “greenness index” as used herein is calculated from digital images of plants. For each pixel belonging to the plant object on the image, the ratio of the green value versus the red value (in the RGB model for encoding color) is calculated. The greenness index is expressed as the percentage of pixels for which the green-to-red ratio exceeds a given threshold. Under normal growth conditions, under salt stress growth conditions, and under reduced nutrient availability growth conditions, the greenness index of plants is measured in the last imaging before flowering. In contrast, under drought stress growth conditions, the greenness index of plants is measured in the first imaging after drought.

### Plant

[0128] The term “plant” as used herein encompasses whole plants, ancestors and progeny of the plants and plant parts, including seeds, shoots, stems, leaves, roots (including tubers), flowers, and tissues and organs, wherein each of the aforementioned comprise the gene/nucleic acid of interest. The term “plant” also encompasses plant cells, suspension cultures, callus tissue, embryos, meristematic regions, gametophytes, sporophytes, pollen and microspores, again wherein each of the aforementioned comprises the gene/nucleic acid of interest.

[0129] Plants that are particularly useful in the methods of the invention include all plants which belong to the superfamily Viridiplantae, in particular monocotyledonous and dicotyledonous plants including fodder or forage legumes, ornamental plants, food crops, trees or shrubs selected from the list comprising Acer spp., Actinidia spp., Abelmoschus spp., Agave sisalana, Agropyron spp., Agrostis stolonifera, Allium spp., Amaranthus spp., Ammophila arenaria, Ananas comosus, Annona spp., Apium graveolens, Arachis spp, Artocarpus spp., Asparagus officinalis, Avena spp. (e.g. Avena sativa, Avena fatua, Avena byzantina, Avena fatua var. sativa, Avena hybrida), Averrhoa carambola, Bambusa sp., Benincasa hispida, Bertholletia excelsea, Beta vulgaris, Brassica spp. (e.g. Brassica napus, Brassica rapa ssp. [canola, oilseed rape, turnip rape]), Cadaba farinosa, Camellia sinensis, Canna indica, Cannabis sativa, Capsicum spp., Carex elata, Carica papaya, Carissa macrocarpa, Carya spp., Carthamus tinctorius, Castanea spp., Ceiba pentandra, Cichorium endivia, Cinnamomum spp., Citrullus lanatus, Citrus spp., Cocos spp., Coffea spp., Colocasia esculenta, Cola spp., Corchorus sp., Coriandrum sativum, Corylus spp., Crataegus spp., Crocus sativus, Cucurbita spp., Cucumis spp., Cynara spp., Daucus carota, Desmodium spp., Dimocarpus longan, Dioscorea spp., Diospyros spp., Echinochloa spp., Elaeis (e.g. Elaeis guineensis, Elaeis oleifera), Eleusine coracana, Erianthus sp., Eriobotrya japonica, Eucalyptus sp., Eugenia uniflora, Fagopyrum spp., Fagus spp., Festuca arundinacea, Ficus carica, Fortunella spp., Fragaria spp., Ginkgo biloba, Glycine spp. (e.g. Glycine max, Soja hispida or Soja max), Gossypium hirsutum, Helianthus spp. (e.g. Helianthus annuus), Hemerocallis fulva, Hibiscus spp., Hordeum spp. (e.g. Hordeum vulgare), Ipomoea batatas, Juglans spp., Lactuca sativa, Lathyrus spp., Lens culinaris, Linum usitatissimum, Litchi chinensis, Lotus spp., Luffa acutangula, Lupinus spp., Luzula sylvatica, Lycopersicon spp. (e.g. Lycopersicon esculentum, Lycopersicon lycopersicum, Lycopersicon pyriforme), Macrotyloma spp., Malus spp., Malpighia emarginata, Mammea americana, Mangifera indica, Manihot spp., Manilkara zapota, Medicago sativa, Melilotus spp., Mentha spp., Miscanthus sinensis, Momordica spp., Morus nigra, Musa spp., Nicotiana spp., Olea spp., Opuntia spp., Ornithopus spp., Oryza spp. (e.g. Oryza sativa, Oryza latifolia), Panicum miliaceum, Panicum virgatum, Passiflora edulis, Pastinaca sativa, Pennisetum sp., Persea spp., Petroselinum crispum, Phalaris arundinacea, Phaseolus spp., Phleum pratense, Phoenix spp., Phragmites australis, Physalis spp., Pinus spp., Pistacia vera, Pisum spp., Poa spp., Populus spp., Prosopis spp., Prunus spp., Psidium spp., Punica granatum, Pyrus communis, Quercus spp., Raphanus sativus, Rheum rhabarbarum, Ribes spp., Ricinus communis, Rubus spp., Saccharum spp., Salix sp., Sambucus spp., Secale cereale, Sesamum spp., Sinapis sp., Solanum spp. (e.g. Solanum tuberosum, Solanum integrifolium or Solanum lycopersicum), Sorghum bicolor, Spinacia spp., Syzygium spp., Tagetes spp., Tamarindus indica, Theobroma cacao, Trifolium spp., Triticale sp., Triticosecale rimpaui, Triticum spp. (e.g. Triticum aestivum, Triticum durum, Triticum turgidum, Triticum hybernum, Triticum macha, Triticum sativum or Triticum vulgare), Tropaeolum minus, Tropaeolum majus, Vaccinium spp., Vicia spp., Vigna spp., Viola odorata, Vitis spp., Zea mays, Zizania palustris, Ziziphus spp., amongst others.

### DETAILED DESCRIPTION OF THE INVENTION

[0130] Surprisingly, it has now been found that modulating expression in a plant of a nucleic acid encoding a TCP1 or a TCP2 polypeptide or an Epsin-like polypeptide gives plants having enhanced yield-related traits relative to control plants. According to a first embodiment, the present invention provides a method for enhancing yield-related traits in plants relative to control plants, comprising modulating expression in a plant of a nucleic acid encoding a TCP1 or a TCP2 polypeptide or an Epsin-like polypeptide.

[0131] A preferred method for modulating (preferably, increasing) expression of a nucleic acid encoding a TCP1 or a TCP2 polypeptide is by introducing and expressing in a plant a nucleic acid encoding a TCP1 or a TCP2 polypeptide or an Epsin-like polypeptide.

[0132] Furthermore, surprisingly, it has been found that increasing expression in the seeds of a plant, of a nucleic acid sequence encoding an IPPT polypeptide as defined herein, gives plants having increased yield-related traits relative to control plants. According to a first embodiment, the present invention provides a method for increasing yield-related traits in plants relative to control plants, comprising increasing expression in the seeds of a plant, of a nucleic acid sequence encoding an IPPT polypeptide.

[0133] A preferred method for increasing expression in the seeds of a plant, of a nucleic acid sequence encoding an IPPT polypeptide is by introducing and expressing in the seeds of a plant, a nucleic acid sequence encoding an IPPT polypeptide.

[0134] Also surprisingly, it has been found that modulating expression of a nucleic acid encoding an SHR polypeptide in plants grown under conditions of sub-optimal nutrient availability gives the plants enhanced yield-related traits relative to control plants. It has also surprisingly been found that modulating expression of a nucleic acid encoding an SHR polypeptide in plants grown under non nutrient-limiting conditions gives the plants increased Thousand Kernel Weight (TKW) relative to control plants.

[0135] According one embodiment, there is provided a method for enhancing yield related traits relative to control plants, comprising modulating expression of a nucleic acid encoding an SHR polypeptide in plants grown under conditions of sub-optimal nutrient availability.

[0136] According to another embodiment of the present invention, there is provided a method for increasing Thousand Kernel Weight (TKW) in plants relative to control plants, comprising modulating expression of a nucleic acid encoding an SHR polypeptide in plants grown under non-nutrient limiting conditions.

[0137] A preferred method for modulating (preferably, increasing) expression of a nucleic acid encoding an SHR polypeptide is by introducing and expressing in a plant a nucleic acid encoding an SHR polypeptide.

[0138] Concerning TCP1 or a TCP2 polypeptides/genes, any reference hereinafter to a “protein useful in the methods of the invention” is taken to mean a TCP1 or a TCP2 polypeptide as defined herein. Any reference hereinafter to a “nucleic acid useful in the methods of the invention” is taken to mean a nucleic acid capable of encoding such a TCP1 or a TCP2 polypeptide. The nucleic acid to be introduced into a plant (and therefore useful in performing the methods of the invention) is any nucleic acid encoding the type of protein which will now be described, also referred to as a “TCP1 nucleic acid” or “TCP1 gene” or “TCP2 nucleic acid” or “TCP2 gene”.

[0139] Regarding Epsin-like polypeptides/genes, any reference hereinafter to a “protein useful in the methods of the invention” is taken to mean an Epsin-like polypeptide as defined herein. Any reference hereinafter to a “nucleic acid useful in the methods of the invention” is taken to mean a nucleic acid capable of encoding such an Epsin-like polypeptide. The nucleic acid to be introduced into a plant (and therefore useful in performing the methods of the invention) is any nucleic acid encoding the type of protein which will now be described, hereafter also named “Epsin-like nucleic acid” or “Epsin-like gene”.

[0140] Concerning IPPT polypeptides/genes, any reference hereinafter to a “protein useful in the methods of the invention” is taken to mean an IPPT polypeptide as defined herein. Any reference hereinafter to a “nucleic acid sequence useful in the methods of the invention” is taken to mean a nucleic acid sequence capable of encoding such an IPPT polypeptide. The nucleic acid sequence to be introduced into a plant (and therefore useful in performing the methods of the invention) is any nucleic acid sequence encoding the type of polypeptide, which will now be described, hereafter also named “IPPT nucleic acid sequence” or “IPPT gene”.

[0141] Regarding SHR polypeptides/genes, any reference hereinafter to a “protein useful in the methods of the invention” is taken to mean an SHR polypeptide as defined herein. Any reference hereinafter to a “nucleic acid useful in the methods of the invention” is taken to mean a nucleic acid capable of encoding such an SHR polypeptide. The nucleic acid to be introduced into a plant (and therefore useful in performing the methods of the invention) is any nucleic acid encoding the type of protein which will now be described, hereinafter also named “SHR nucleic acid” or “SHR gene”.

[0142] A “TCP1 polypeptide” as defined herein refers to any polypeptide comprising:

(i) a TCP domain having in increasing order of preference at least 50%, 55%, 60%, 65%, 70%, 75%, 80%, 85%, 90%, 95% or more sequence identity to the TCP domain of any one of the sequences indicated in FIG. 1; and
(ii) a domain having in increasing order of preference at least 50%, 55%, 60%, 65%, 70%, 75%, 80%, 85%, 90%, 95% or more sequence identity to Domain A of any one of the sequences indicated in FIG. 1; and
(iii) a domain having in increasing order of preference at least 50%, 55%, 60%, 65%, 70%, 75%, 80%, 85%, 90%, 95% or more sequence identity to Domain B of any one of the sequences indicated in FIG. 1; and
(iv) a domain having in increasing order of preference at least 50%, 55%, 60%, 65%, 70%, 75%, 80%, 85%, 90%, 95% or more sequence identity to Domain C of any one of the sequences indicated in FIG. 1.

[0143] According to a preferred embodiment, the TCP1 polypeptide comprises:

(i) a TCP domain having in increasing order of preference at least 50%, 55%, 60%, 65%, 70%, 75%, 80%, 85%, 90%, 95% or more sequence identity to the TCP domain of the sequence represented by Ms_TCP_sugar in FIG. 1; and
(ii) a domain having in increasing order of preference at least 50%, 55%, 60%, 65%, 70%, 75%, 80%, 85%, 90%, 95% or more sequence identity to Domain A of the sequence represented by Ms_TCP_sugar in FIG. 1; and
(iii) a domain having in increasing order of preference at least 50%, 55%, 60%, 65%, 70%, 75%, 80%, 85%, 90%, 95% or more sequence identity to Domain B of the sequence represented by Ms_TCP_sugar in FIG. 1; and
(iv) a domain having in increasing order of preference at least 50%, 55%, 60%, 65%, 70%, 75%, 80%, 85%, 90%, 95% or more sequence identity to Domain C of the sequence represented by Ms_TCP_sugar in FIG. 1.

[0144] A “TCP2 polypeptide” as defined herein refers to any polypeptide comprising:

(i) a TCP domain having in increasing order of preference at least 50%, 55%, 60%, 65%, 70%, 75%, 80%, 85%, 90%, 95% or more sequence identity to the TCP domain of any of the sequences indicated in FIG. 2; and
(ii) a domain having in increasing order of preference at least 50%, 55%, 60%, 65%, 70%, 75%, 80%, 85%, 90%, 95% or more sequence identity to Domain 1 of any of the sequences indicated in FIG. 2; and
(iii) a domain having in increasing order of preference at least 50%, 55%, 60%, 65%, 70%, 75%, 80%, 85%, 90%, 95% or more sequence identity to Domain 2 of any of the sequences indicated in FIG. 2; and
(iv) a domain having in increasing order of preference at least 50%, 55%, 60%, 65%, 70%, 75%, 80%, 85%, 90%, 95% or more sequence identity to Domain 3 of any of the sequences indicated in FIG. 2.

[0145] According to a preferred embodiment, the TCP2 polypeptide comprises:

(i) a TCP domain having in increasing order of preference at least 50%, 55%, 60%, 65%, 70%, 75%, 80%, 85%, 90%, 95% or more sequence identity to the TCP domain of the sequence represented by Mt_TCP2_sugar in FIG. 2; and
(ii) a domain having in increasing order of preference at least 50%, 55%, 60%, 65%, 70%, 75%, 80%, 85%, 90%, 95% or more sequence identity to Domain 1 of the sequence represented by Mt_TCP2_sugar in FIG. 2; and
(iii) a domain having in increasing order of preference at least 50%, 55%, 60%, 65%, 70%, 75%, 80%, 85%, 90%, 95% or more sequence identity to Domain 2 of the sequence represented by Mt_TCP2_sugar in FIG. 2; and
(iv) a domain having in increasing order of preference at least 50%, 55%, 60%, 65%, 70%, 75%, 80%, 85%, 90%, 95% or more sequence identity to Domain 3 of the sequence represented by Mt_TCP2_sugar in FIG. 2.

[0146] In addition, the TCP2 polypeptide may comprise any one or both of:

(v) a domain having in increasing order of preference at least 50%, 55%, 60%, 65%, 70%, 75%, 80%, 85%, 90%, 95% or more sequence identity to Domain 4 of any of the sequences indicated in FIG. 2;
(vi) a domain having in increasing order of preference at least 50%, 55%, 60%, 65%, 70%, 75%, 80%, 85%, 90%, 95% or more sequence identity to Domain 5 of any of the sequences indicated in FIG. 2.

[0147] Preferably, Domain 4 has in increasing order of preference at least 50%, 55%, 60%, 65%, 70%, 75%, 80%, 85%, 90%, 95% or more sequence identity to Domain 4 of the sequence represented by Mt_TCP2_sugar in FIG. 2.

[0148] Preferably, Domain 5 has in increasing order of preference at least 50%, 55%, 60%, 65%, 70%, 75%, 80%, 85%, 90%, 95% or more sequence identity to Domain 5 of the sequence represented by Mt_TCP2_sugar in FIG. 2.

[0149] The TCP1 or TCP2 protein has in increasing order of preference at least 25%, 26%, 27%, 28%, 29%, 30%, 31%, 32%, 33%, 34%, 35%, 36%, 37%, 38%, 39%, 40%, 41%, 42%, 43%, 44%, 45%, 46%, 47%, 48%, 49%, 50%, 51%, 52%, 53%, 54%, 55%, 56%, 57%, 58%, 59%, 60%, 61%, 62%, 63%, 64%, 65%, 66%, 67%, 68%, 69%, 70%, 71%, 72%, 73%, 74%, 75%, 76%, 77%, 78%, 79%, 80%, 81%, 82%, 83%, 84%, 85%, 86%, 87%, 88%, 89%, 90%, 91%, 92%, 93%, 94%, 95%, 96%, 97%, 98%, or 99% overall sequence identity to the amino acid represented by SEQ ID NO: 2 or SEQ ID NO: 4 respectively. The overall sequence identity is determined using a global alignment algorithm, such as the Needleman Wunsch algorithm in the program GAP (GCG Wisconsin Package, Accelrys), preferably with default parameters. Compared to overall sequence identity, the sequence identity will generally be higher when only conserved domains or motifs are considered.

[0150] Preferably, the TCP1 or TCP2 polypeptide sequence which when used in the construction of a TCP phylogenetic tree, such as the one depicted in FIG. 2, clusters with the group of TCP1 or TCP2 polypeptides comprising the amino acid sequence represented by SEQ ID NO: 2 or SEQ ID NO: 4 rather than with any other group.

[0151] A “Epsin-like polypeptide” as defined herein refers to any polypeptide comprising an ENTH domain (SMART accession SM00273) in its N-terminal half. The ENTH domain is known in the art and is described in the InterPro database: The ENTH (Epsin N-terminal homology) domain is approximately 150 amino acids in length and is always found located at the N-termini of proteins. The domain forms a compact globular structure, composed of 9 alpha-helices connected by loops of varying length. The general topology is determined by three helical hairpins that are stacked consecutively with a right hand twist. An N-terminal helix folds back, forming a deep basic groove that forms the binding pocket for the Ins(1,4,5)P3 ligand. The ligand is coordinated by residues from surrounding alpha-helices and all three phosphates are multiply coordinated. The coordination of Ins(1,4,5)P3 suggests that ENTH is specific for particular head groups. Proteins containing this domain have been found to bind PtdIns(4,5)P2 and PtdIns(1,4,5)P3 suggesting that the domain may be a membrane interacting module. The main function of proteins containing this domain appears to be to act as accessory clathrin adaptors in endocytosis, Epsin is able to recruit and promote clathrin polymerisation on a lipid monolayer, but may have additional roles in signalling and actin regulation. Epsin causes a strong degree of membrane curvature and tubulation, even fragmentation of membranes with a high PtdIns(4,5)P2 content. Epsin binding to membranes facilitates their deformation by insertion of the N-terminal helix into the outer leaflet of the bilayer, pushing the head groups apart. This would reduce the energy needed to curve the membrane into a vesicle, making it easier for the clathrin cage to fix and stabilise the curved membrane. This points to a pioneering role for epsin in vesicle budding as it provides both a driving force and a link between membrane invagination and clathrin polymerisation (annotation IPR013809).

[0152] Preferably, the Epsin-like polypeptide useful in the methods of the present invention furthermore comprises two or more of the following motifs:

### Motif 1: (V/I)(L/R)(D/E)AT(S/D/N)(N/D/E/S)E(P/S)WGPHG(T/S/E) (SEQ ID NO: 48)

### Preferably, Motif 1 is: (V/I)LDAT(S/D/N)(N/D)E(P/S)WGPHG(T/S)

[0153] More preferably, Motif 1 is VLDATDNEPWGPHGT

### Motif 2: F(Q/E)(Y/F)(I/L/V/R/K)(D/E)(S/P/A)(S/G/N/Q/R)G(R/K)D(Q/V/A/H/E)G(S/N/L/I/V)NVR (SEQ ID NO: 49)

### Preferably, Motif 2 is: F(Q/E)(Y/F)(I/L/V)(D/E)(S/P)(S/G/N)G(R/K)D(Q/V/A)G(S/N/L/I)NVR

[0154] More preferably, Motif 2 is FEYVEPNGKDVGINVR

### Motif 3: (E/S/A/Q)(V/I/E/A)R(Q/E/D/N)KA(A/L/V/E)(A/V/S/R/K)(N/T)(R/A)(D/E/N/G)K (SEQ ID NO: 50)

### Preferably, Motif 3 is: (E/S/A)(V/I)R(Q/E/D/N)KA(A/L/V)(A/V/S)(N/T)R(D/E/N)K

[0155] More preferably, Motif 3 is EIRDKAVANRNK

### Motif 4: WAD(T/S)LSRGL(V/I) (SEQ ID NO: 51)

### Preferably, Motif 4 is: WADSLSRGLI

### Motif 5: L(A/S)D(I/V)G(I/V)(D/V)(F/G)(D/E/P/G) (SEQ ID NO: 52)

### Preferably, Motif 5 is: LADVGVVGD

[0156] In addition to the previous motifs, the protein useful in the methods of the present invention preferably also comprises in its native form one or more of the following motifs:

Motif 6 (a to c): one of the following tetrapeptides: GGYG, GSYG or GGYD (SEQ ID NO: 53, 54, 55)
Motif 7 (a to d): one of the following tetrapeptides: SAAS, SSAS, SSAP, or SSAT (SEQ ID NO: 56, 57, 58, 59)
Motif 8 (a to e): one of the following tetrapeptides: DEFD, DFFD, DDDF, EDDF, or DDFD (SEQ ID NO: 60, 61, 62, 63, 64)

[0157] Alternatively, the homologue of an Epsin-like protein has in increasing order of preference at least 25%, 26%, 27%, 28%, 29%, 30%, 31%, 32%, 33%, 34%, 35%, 36%, 37%, 38%, 39%, 40%, 41%, 42%, 43%, 44%, 45%, 46%, 47%, 48%, 49%, 50%, 51%, 52%, 53%, 54%, 55%, 56%, 57%, 58%, 59%, 60%, 61%, 62%, 63%, 64%, 65%, 66%, 67%, 68%, 69%, 70%, 71%, 72%, 73%, 74%, 75%, 76%, 77%, 78%, 79%, 80%, 81%, 82%, 83%, 84%, 85%, 86%, 87%, 88%, 89%, 90%, 91%, 92%, 93%, 94%, 95%, 96%, 97%, 98%, or 99% overall sequence identity to the amino acid represented by SEQ ID NO: 44, provided that the homologous protein comprises two or more of the conserved motifs as outlined above. The overall sequence identity is determined using a global alignment algorithm, such as the Needleman Wunsch algorithm in the program GAP (GCG Wisconsin Package, Accelrys), preferably with default parameters. Compared to overall sequence identity, the sequence identity will generally be higher when only conserved domains or motifs are considered. For example, when the ENTH domain is compared among the Epsin-like polypeptides, the sequence identity will be much higher compared to the overall sequence identity.

[0158] Preferably, the polypeptide sequence which when used in the construction of a phylogenetic tree, such as the one depicted in FIG. 3 (Holstein and Oliviusson, Protoplasma 226, 13-21, 2005), clusters with the group of Epsin-like polypeptides comprising the amino acid sequence represented by SEQ ID NO: 44 rather than with any other group.

[0159] An “IPPT polypeptide” as defined herein refers to any polypeptide comprising (i) a tRNA isopentenyltransferase domain with an InterPro accession IPR002627; and (ii) an N-terminal ATP/GTP-binding site motif A (P-loop).

[0160] Alternatively or additionally, an “IPPT polypeptide” as defined herein refers to any polypeptide sequence having (i) in increasing order of preference at least 70%, 75%, 80%, 85%, 90%, 95%, 98%, 99% or more amino acid sequence identity to an N-terminal ATP/GTP-binding site motif A (P-loop) as represented by SEQ ID NO: 199; and having in increasing order of preference at least 70%, 75%, 80%, 85%, 90%, 95%, 98%, 99% or more amino acid sequence identity to one or more of: (ii) Conserved motif I DSR(Q/L)(V/L/I) as represented by SEQ ID NO: 200; or (ii) Conserved motif II (N/D/S/T)(I/V)GTAKP(T/S) as represented by SEQ ID NO: 201; or (iii) Conserved motif III L(V/A/I)GG(S/T)GLY as represented by SEQ ID NO:202; or (iv) Conserved motif IV F/Y/L)AK(R/K/Q)Q(R/K/M)TWFR as represented by SEQ ID NO:203.

[0161] Alternatively or additionally, an “IPPT polypeptide” as defined herein refers to any polypeptide having in increasing order of preference at least 35%, 40%, 45%, 50%, 55%, 60%, 65%, 70%, 75%, 80%, 85%, 90%, 95%, 98%, 99% or more amino acid sequence identity to the IPPT polypeptide as represented by SEQ ID NO: 144 or to any of the polypeptide sequences given in Table A4 herein.

[0162] Alternatively or additionally, an “IPPT polypeptide” is capable of complementing a yeast mod5 mutant strain which lacks endogenous IPPT activity, or is capable of complementing an E. coli miaA mutant strain which lacks endogenous IPPT activity.

[0163] An “SHR polypeptide” as defined herein refers to any full length polypeptide which when used in the construction of a GRAS phylogenetic tree, such as the one depicted in FIG. 14, clusters with the group of SHR polypeptides comprising the amino acid sequence represented by SEQ ID NO: 209 rather than with any other group.

[0164] SHR polypeptides, being members of the GRAS family of plant transcription factors, may comprise features typical of the GRAS gene family. Such typical features include a highly conserved C-terminal region, but variable N-terminal region. The highly conserved C-terminal region comprises five distinct motifs, typically found in the following order:

1. leucine heptad repeat (LHR1),
2. VHIID motif,
3. leucine heptad repeat II (LHR II),
4. PFYRE motif, and
5. SAW motif.

[0165] LHR I appears to consist of two repeat units that are separated by a spacer that often contains a proline residue, known to disrupt alpha-helical structures. The two units within LHR I are not in phase with each other. LHR IA is similar to LHRs found in other proteins, consisting of between three to five regular heptads. LHR IB is shorter, usually consisting of only two such repeats. In LHR II, specific leucine heptad repeats can be identified in this region in nearly all members of the GRAS family, the number of repeats is small, usually two or three.

[0166] The VHIID sequence is readily recognizable in all members of the family, although it is not absolutely conserved: substitutions of valine, isoleucine and leucine at the 1, 3 and 4 positions yield a number of permutations. Within the larger region that we term the VHIID motif, the P-N-H-D-Q-L residues are absolutely conserved. The spacing between the proline and asparagine residues is identical among all members, as is the spacing between the histidine, aspartate, glutamine and leucine residues. The VHIID motif is bounded at its C-terminus by a conserved sequence referred to as LRITG for simplicity.

[0167] Most of the deviations from this consensus sequence represent conservative changes.

[0168] In the PFYRE motif, P is absolutely conserved. Within the PFYRE domain, the sequences are largely co-linear and portions of this region show a high degree of sequence similarity among all members of the GRAS family.

[0169] The SAW motif is characterized by three pairs of absolutely conserved residues: R-E, W-G and W-W. The W-W pair found nearly at the C-terminus of these sequences shows absolute conservation of spacing, as does the W-G pair.

[0170] In addition to an SHR polypeptide clustering with other SHR polypeptides in a GRAS phylogenetic tree, preferably, the C-terminal region an SHR polypeptide useful in the methods of the invention has in increasing order of preference at least 50%, 51%, 52%, 53%, 54%, 55%, 56%, 57%, 58%, 59%, 60%, 61%, 62%, 63%, 64%, 65%, 66%, 67%, 68%, 69%, 70%, 71%, 72%, 73%, 74%, 75%, 76%, 77%, 78%, 79%, 80%, 81%, 82%, 83%, 84%, 85%, 86%, 87%, 88%, 89%, 90%, 91%, 92%, 93%, 94%, 95%, 96%, 97%, 98%, or 99% overall sequence identity to the C-terminal region of the amino acid represented by SEQ ID NO: 209.

[0171] The overall sequence identity is determined using a global alignment algorithm, such as the Needleman Wunsch algorithm in the program GAP (GCG Wisconsin Package, Accelrys), preferably with default parameters. Compared to overall sequence identity, the sequence identity will generally be higher when only conserved domains or motifs are considered.

[0172] The term “domain” and “motif” is defined in the “definitions” section herein. Specialist databases exist for the identification of domains, for example, SMART (Schultz et al. (1998) Proc. Natl. Acad. Sci. USA 95, 5857-5864; Letunic et al. (2002) Nucleic Acids Res 30, 242-244), InterPro (Mulder et al., (2003) Nucl. Acids. Res. 31, 315-318), Prosite (Bucher and Bairoch (1994), A generalized profile syntax for biomolecular sequences motifs and its function in automatic sequence interpretation. (In) ISMB-94; Proceedings 2nd International Conference on Intelligent Systems for Molecular Biology. Altman R., Brutlag D., Karp P., Lathrop R., Searls D., Eds., pp 53-61, AAAI Press, Menlo Park; Hulo et al., Nucl. Acids. Res. 32:D134-D137, (2004)), or Pfam (Bateman et al., Nucleic Acids Research 30(1): 276-280 (2002)). A set of tools for in silico analysis of protein sequences is available on the ExPASy proteomics server (Swiss Institute of Bioinformatics (Gasteiger et al., ExPASy: the proteomics server for in-depth protein knowledge and analysis, Nucleic Acids Res. 31:3784-3788 (2003)). Domains or motifs may also be identified using routine techniques, such as by sequence alignment.

[0173] Analysis of the polypeptide sequence of SEQ ID NO: 144 is presented below in Example 4 herein. For example, an IPPT polypeptide as represented by SEQ ID NO: 144 comprises a tRNA isopentenyltransferase domain with an InterPro accession IPR002627. Domains may also be identified using routine techniques, such as by sequence alignment. An alignment of the polypeptides of Table A4 herein, is shown in FIG. 3. Such alignments are useful for identifying the most conserved domains or motifs between the IPPT polypeptides, such as the Conserved motifs as represented by SEQ ID NO: 200 to 203 (comprised in SEQ ID NO: 144).

[0174] Methods for the alignment of sequences for comparison are well known in the art, such methods include GAP, BESTFIT, BLAST, FASTA and TFASTA. GAP uses the algorithm of Needleman and Wunsch ((1970) J Mol Biol 48: 443-453) to find the global (i.e. spanning the complete sequences) alignment of two sequences that maximizes the number of matches and minimizes the number of gaps. The BLAST algorithm (Altschul et al. (1990) J Mol Biol 215: 403-10) calculates percent sequence identity and performs a statistical analysis of the similarity between the two sequences. The software for performing BLAST analysis is publicly available through the National Centre for Biotechnology Information (NCBI). Homologues may readily be identified using, for example, the ClustalW multiple sequence alignment algorithm (version 1.83), with the default pairwise alignment parameters, and a scoring method in percentage. Global percentages of similarity and identity may also be determined using one of the methods available in the MatGAT software package (Campanella et al., BMC Bioinformatics. 2003 Jul. 10; 4:29. MatGAT: an application that generates similarity/identity matrices using protein or DNA sequences.). Minor manual editing may be performed to optimise alignment between conserved motifs, as would be apparent to a person skilled in the art. Furthermore, instead of using full-length sequences for the identification of homologues, specific domains may also be used. The sequence identity values may be determined over the entire nucleic acid or amino acid sequence or over selected domains or conserved motif(s), using the programs mentioned above using the default parameters. For local alignments, the Smith-Waterman algorithm is particularly useful (Smith T F, Waterman M S (1981) J. Mol. Biol 147(1); 195-7).

[0175] Furthermore, TCP 1 and TCP2 polypeptides (at least in their native form) typically have DNA binding activity. Tools and techniques for measuring DNA binding activity are well known in the art. Further details are provided in Example 6.

[0176] In addition, TCP 1 and TCP2 polypeptides, when expressed in rice according to the methods of the present invention as outlined in the Examples section, give plants having increased yield related traits, in particular increased seed yield.

[0177] Furthermore, Epsin-like polypeptides (at least in their native form) typically have lipid binding activity. Tools and techniques for measuring lipid binding activity are well known in the art. For example, lipid binding by the ENTH domain is described by Hom et al. (J. Mol. Biol. 373, 412-423, 2007). Further details are provided in Example 6.

[0178] In addition, Epsin-like polypeptides, when expressed in rice according to the methods of the present invention as outlined in Examples 7 and 8, give plants having increased yield related traits, in particular one or more of increased total weight of seeds, fill rate, total number of seeds and number of filled seeds.

[0179] Example 3 herein describes in Table B4 the percentage identity between the IPPT polypeptide as represented by SEQ ID NO: 144 and the IPPT polypeptides listed in Table A4, which can be as low as 39% amino acid sequence identity.

[0180] The task of protein subcellular localisation prediction is important and well studied. Knowing a protein's localisation helps elucidate its function. Experimental methods for protein localization range from immunolocalization to tagging of proteins using green fluorescent protein (GFP) or beta-glucuronidase (GUS). Such methods are accurate although labor-intensive compared with computational methods. Recently much progress has been made in computational prediction of protein localisation from sequence data. Among algorithms well known to a person skilled in the art are available at the ExPASy Proteomics tools hosted by the Swiss Institute for Bioinformatics, for example, PSort, TargetP, ChloroP, LocTree, Predotar, LipoP, MITOPROT, PATS, PTS1, SignalP, TMHMM, and others.

[0181] Furthermore, IPPT polypeptides useful in the methods of the present invention (at least in their native form) typically are capable of transferring the isopentenyl moiety from delta(2)-dimethylallyl diphosphate (DMAPP) or hydroxymethylbutenyl diphosphate (HMBDP) to an adenine at position 37 of certain tRNAs. Many assays exist to measure such enzymatic activity, including complementation assays of a yeast strain with defective endogenous IPPT activity (encoded by the MOD5 gene; Golovko et al. (2002) Plant Molec Biol 49: 161-169), complementation assays of an E. coli strain with defective endogenous IPPT activity (encoded by the miaA gene; Dihanich et al. (1987) Mol Cell Biol 7: 177-184), or quantification of cytokinins in tRNA (Gray et al. (1996) Plant Physiol 110: 431-438, Miyawaki et al. (2006) Proc Natl Acad SCi USA 103(44): 16598-16603).

[0182] In addition, SHR polypeptides, when expressed in rice grown under conditions of sub-optimal nutrient availability gives the plants enhanced yield-related traits relative to control plants. SHR polypeptides when expressed in rice grown under non-nutrient limiting conditions gives the plants increased Thousand Kernel Weight (TKW) in plants relative to control plants.

[0183] Concerning TCP1 and TCP2, the present invention is illustrated by transforming plants with the nucleic acid sequence represented by SEQ ID NO: 1, encoding the polypeptide sequence of SEQ ID NO: 2 and by transforming plants with the nucleic acid sequence represented by SEQ ID NO: 3, encoding the polypeptide sequence of SEQ ID NO: 4. However, performance of the invention is not restricted to these sequences; the methods of the invention may advantageously be performed using any TCP1-encoding or TCP2-encoding nucleic acid, or using a TCP1 or TCP2 polypeptide as defined herein.

[0184] Concerning TCP1 and TCP2, examples of nucleic acids encoding TCP1 and TCP2 polypeptides are given in Example 1 herein. Such nucleic acids are useful in performing the methods of the invention. The amino acid sequences encoded by the nucleic acid sequences given in Example 1 are example sequences of orthologues and paralogues of the TCP 1 polypeptide represented by SEQ ID NO: 2, and the amino acid sequences encoded by the nucleic acid sequences given in Example 1 are example sequences of orthologues and paralogues of the TCP 2 polypeptide represented by SEQ ID NO: 4, the terms “orthologues” and “paralogues” being as defined herein. Further orthologues and paralogues may readily be identified by performing a so-called reciprocal blast search. Typically, this involves a first BLAST involving BLASTing a query sequence (for example using any of the sequences listed in Example 1) against any sequence database, such as the publicly available NCBI database. BLASTN or TBLASTX (using standard default values) are generally used when starting from a nucleotide sequence, and BLASTP or TBLASTN (using standard default values) when starting from a protein sequence. The BLAST results may optionally be filtered. The full-length sequences of either the filtered results or non-filtered results are then BLASTed back (second BLAST) against sequences from the organism from which the query sequence is derived (where the query sequence is SEQ ID NO: 1 to SEQ ID NO: 4, the second BLAST would therefore be against Medicago sequences). The results of the first and second BLASTs are then compared. A paralogue is identified if a high-ranking hit from the first blast is from the same species as from which the query sequence is derived, a BLAST back then ideally results in the query sequence amongst the highest hits; an orthologue is identified if a high-ranking hit in the first BLAST is not from the same species as from which the query sequence is derived, and preferably results upon BLAST back in the query sequence being among the highest hits.

[0185] Concerning Epsin-like-sequences, the present invention is illustrated by transforming plants with the nucleic acid sequence represented by SEQ ID NO: 43, encoding the polypeptide sequence of SEQ ID NO: 44. However, performance of the invention is not restricted to these sequences; the methods of the invention may advantageously be performed using any Epsin-like-encoding nucleic acid or Epsin-like polypeptide as defined herein.

[0186] Concerning Epsin-like-sequences, examples of nucleic acids encoding Epsin-like polypeptides are given in Table A3 of Example 1 herein. Such nucleic acids are useful in performing the methods of the invention. The amino acid sequences given in Table A3 of Example 1 are example sequences of orthologues and paralogues of the Epsin-like polypeptide represented by SEQ ID NO: 44, the terms “orthologues” and “paralogues” being as defined herein. Further orthologues and paralogues may readily be identified by performing a so-called reciprocal blast search. Typically, this involves a first BLAST involving BLASTing a query sequence (for example using any of the sequences listed in Table A3 of Example 1) against any sequence database, such as the publicly available NCBI database. BLASTN or TBLASTX (using standard default values) are generally used when starting from a nucleotide sequence, and BLASTP or TBLASTN (using standard default values) when starting from a protein sequence. The BLAST results may optionally be filtered. The full-length sequences of either the filtered results or non-filtered results are then BLASTed back (second BLAST) against sequences from the organism from which the query sequence is derived (where the query sequence is SEQ ID NO: 43 or SEQ ID NO: 44, the second BLAST would therefore be against Arabidopsis sequences). The results of the first and second BLASTs are then compared. A paralogue is identified if a high-ranking hit from the first blast is from the same species as from which the query sequence is derived, a BLAST back then ideally results in the query sequence amongst the highest hits; an orthologue is identified if a high-ranking hit in the first BLAST is not from the same species as from which the query sequence is derived, and preferably results upon BLAST back in the query sequence being among the highest hits.

[0187] Concerning IPPT, the present invention is illustrated by transforming plants with the nucleic acid sequence represented by SEQ ID NO: 143, encoding the IPPT polypeptide sequence of SEQ ID NO: 144. However, performance of the invention is not restricted to these sequences; the methods of the invention may advantageously be performed using any nucleic acid sequence encoding an IPPT polypeptide as defined herein.

[0188] Concerning IPPT, examples of nucleic acid sequences encoding IPPT polypeptides are given in Table A4 of Example 1 herein. Such nucleic acid sequences are useful in performing the methods of the invention. The polypeptide sequences given in Table A4 of Example 1 are example sequences of orthologues and paralogues of the IPPT polypeptide represented by SEQ ID NO: 144, the terms “orthologues” and “paralogues” being as defined herein. Further orthologues and paralogues may readily be identified by performing a so-called reciprocal blast search. Typically, this involves a first BLAST involving BLASTing a query sequence (for example using any of the sequences listed in Table A4 of Example 1) against any sequence database, such as the publicly available NCBI database. BLASTN or TBLASTX (using standard default values) are generally used when starting from a nucleotide sequence, and BLASTP or TBLASTN (using standard default values) when starting from a protein sequence. The BLAST results may optionally be filtered. The full-length sequences of either the filtered results or non-filtered results are then BLASTed back (second BLAST) against sequences from the organism from which the query sequence is derived (where the query sequence is SEQ ID NO: 143 or SEQ ID NO: 144, the second BLAST would therefore be against Synechococcus sp. PCC 7942 sequences). The results of the first and second BLASTs are then compared. A paralogue is identified if a high-ranking hit from the first blast is from the same species as from which the query sequence is derived, a BLAST back then ideally results in the query sequence amongst the highest hits; an orthologue is identified if a high-ranking hit in the first BLAST is not from the same species as from which the query sequence is derived, and preferably results upon BLAST back in the query sequence being among the highest hits.

[0189] Concerning SHR, the present invention is illustrated by transforming plants with the nucleic acid sequence represented by SEQ ID NO: 208, encoding the polypeptide sequence of SEQ ID NO: 209. However, performance of the invention is not restricted to these sequences; the methods of the invention may advantageously be performed using any SHR-encoding nucleic acid or SHR polypeptide as defined herein.

[0190] Concerning SHR, examples of nucleic acids encoding SHR polypeptides are given in Table A5 of Example 1 herein. Such nucleic acids are useful in performing the methods of the invention. The amino acid sequences given in Table A5 of Example 1 are example sequences of orthologues and paralogues of the SHR polypeptide represented by SEQ ID NO: 209, the terms “orthologues” and “paralogues” being as defined herein. Further orthologues and paralogues may readily be identified by performing a so-called reciprocal blast search. Typically, this involves a first BLAST involving BLASTing a query sequence (for example using any of the sequences listed in Table A5 of Example 1) against any sequence database, such as the publicly available NCBI database. BLASTN or TBLASTX (using standard default values) are generally used when starting from a nucleotide sequence, and BLASTP or TBLASTN (using standard default values) when starting from a protein sequence. The BLAST results may optionally be filtered. The full-length sequences of either the filtered results or non-filtered results are then BLASTed back (second BLAST) against sequences from the organism from which the query sequence is derived (where the query sequence is SEQ ID NO: 208 or SEQ ID NO: 209, the second BLAST would therefore be against Arabidopsis sequences). The results of the first and second BLASTs are then compared. A paralogue is identified if a high-ranking hit from the first blast is from the same species as from which the query sequence is derived, a BLAST back then ideally results in the query sequence amongst the highest hits; an orthologue is identified if a high-ranking hit in the first BLAST is not from the same species as from which the query sequence is derived, and preferably results upon BLAST back in the query sequence being among the highest hits.

[0191] High-ranking hits are those having a low E-value. The lower the E-value, the more significant the score (or in other words the lower the chance that the hit was found by chance). Computation of the E-value is well known in the art. In addition to E-values, comparisons are also scored by percentage identity. Percentage identity refers to the number of identical nucleotides (or amino acids) between the two compared nucleic acid (or polypeptide) sequences over a particular length. In the case of large families, ClustalW may be used, followed by a neighbour joining tree, to help visualize clustering of related genes and to identify orthologues and paralogues.

[0192] Nucleic acid variants may also be useful in practising the methods of the invention. Examples of such variants include nucleic acids encoding homologues and derivatives of any one of the amino acid sequences encoded by the nucleic acid sequences given in table A of Example 1, the terms “homologue” and “derivative” being as defined herein. Also useful in the methods of the invention are nucleic acids encoding homologues and derivatives of orthologues or paralogues of any one of the amino acid sequences encoded by the nucleic acid sequences given in table A of Example 1. Homologues and derivatives useful in the methods of the present invention have substantially the same biological and functional activity as the unmodified protein from which they are derived.

[0193] Further nucleic acid variants useful in practising the methods of the invention include portions of nucleic acids encoding TCP1 or TCP2, Epsin-like, IPPT or SHR polypeptides, nucleic acids hybridising to nucleic acids encoding TCP1 or TCP2, Epsin-like, IPPT or SHR polypeptides, splice variants of nucleic acids encoding TCP1 or TCP2, Epsin-like, IPPT or SHR polypeptides, allelic variants of nucleic acids encoding TCP1 or TCP2, Epsin-like, IPPT or SHR polypeptides and variants of nucleic acids encoding TCP1 or TCP2, Epsin-like, IPPT or SHR polypeptides obtained by gene shuffling. The terms hybridising sequence, splice variant, allelic variant and gene shuffling are as described herein.

[0194] Nucleic acids encoding TCP1 or TCP2, Epsin-like, or IPPT need not be full-length nucleic acids, since performance of the methods of the invention does not rely on the use of full-length nucleic acid sequences. According to the present invention, there is provided a method for enhancing yield-related traits in plants, comprising introducing and expressing in a plant a portion of any one of the nucleic acid sequences encoded by the nucleic acid sequences given in table A of Example 1, or a portion of a nucleic acid encoding an orthologue, paralogue or homologue of any of the amino acid sequences encoded by the nucleic acid sequences given in Example 1.

[0195] Nucleic acids encoding SHR polypeptides need not be full-length nucleic acids, since performance of the methods of the invention does not rely on the use of full-length nucleic acid sequences. According to the present invention, there is provided a method for enhancing yield-related traits in plants grown under conditions of sub-optimal nutrient availability, comprising introducing and expressing in a plant a portion of any one of the nucleic acid sequences given in Table A5 of Example 1, or a portion of a nucleic acid encoding an orthologue, paralogue or homologue of any of the amino acid sequences given in Table A5 of Example 1. There is also provided a method for increasing TKW in plants grown under non-nutrient limiting conditions, comprising introducing and expressing in a plant a portion of any one of the nucleic acid sequences given in Table A5 of Example 1, or a portion of a nucleic acid encoding an orthologue, paralogue or homologue of any of the amino acid sequences given in Table A5 of Example 1.

[0196] A portion of a nucleic acid may be prepared, for example, by making one or more deletions to the nucleic acid. The portions may be used in isolated form or they may be fused to other coding (or non-coding) sequences in order to, for example, produce a protein that combines several activities. When fused to other coding sequences, the resultant polypeptide produced upon translation may be bigger than that predicted for the protein portion.

[0197] Concerning TCP1 or TCP2, portions useful in the methods of the invention, encode a TCP1 or TCP2 polypeptide as defined herein, and have substantially the same biological activity as the amino acid sequences encoded by the nucleic acid sequences given in Example 1. Preferably, the portion is a portion of any one of the nucleic acids given in Example 1, or is a portion of a nucleic acid encoding an orthologue or paralogue of any one of the amino acid sequences encoded by the nucleic acid sequences given in Example 1. Preferably the portion is at least 500, 550, 600, 650, 700, 750, 800, 850, 900, 950, 100, 1050, 1100, 1150, 1200, 1250, 1300, 1350, 1400, 1450, 1500 consecutive nucleotides in length, the consecutive nucleotides being of any one of the nucleic acid sequences given in Example 1, or of a nucleic acid encoding an orthologue or paralogue of any one of the amino acid sequences encoded by the nucleic acid sequences given in Example 1. Most preferably the portion is a portion of the nucleic acid of SEQ ID NO: 1 or SEQ ID NO: 3. Preferably, the portion encodes a fragment of an amino acid sequence which, when used in the construction of a phylogenetic tree, such as the one depicted in FIG. 1 or 2, clusters with the group of TCP1 or TCP2 polypeptides comprising the amino acid sequence represented by SEQ ID NO: 2 or SEQ ID NO: 4 rather than with any other group.

[0198] Concerning Epsin-like sequences, portions useful in the methods of the invention, encode an Epsin-like polypeptide as defined herein, and have substantially the same biological activity as the amino acid sequences given in Table A3 of Example 1. Preferably, the portion is a portion of any one of the nucleic acids given in Table A3 of Example 1, or is a portion of a nucleic acid encoding an orthologue or paralogue of any one of the amino acid sequences given in Table A3 of Example 1. Preferably the portion is at least 500, 600, 700, 800, 900, 1000, 1100, 1200, 1300, 1400, 1500, 1600, 1700, 1800, 1850, 1900, 1950, 2000, 2050, 2100, 2150, 2200, 2250, 2300 consecutive nucleotides in length, the consecutive nucleotides being of any one of the nucleic acid sequences given in Table A3 of Example 1, or of a nucleic acid encoding an orthologue or paralogue of any one of the amino acid sequences given in Table A3 of Example 1. Most preferably the portion is a portion of the nucleic acid of SEQ ID NO: 43. Preferably, the portion encodes a fragment of an amino acid sequence which, when used in the construction of a phylogenetic tree, such as the one depicted in FIG. 3 (Holstein and Oliviusson, Protoplasma 226, 13-21, 2005), clusters with the group of Epsin-like polypeptides comprising the amino acid sequence represented by SEQ ID NO: 44 rather than with any other group.

[0199] Concerning IPPT, portions useful in the methods of the invention, encode an IPPT polypeptide as defined herein, and have substantially the same biological activity as the polypeptide sequences given in Table A4 of Example 1. Preferably, the portion is a portion of any one of the nucleic acid sequences given in Table A4 of Example 1, or is a portion of a nucleic acid sequence encoding an orthologue or paralogue of any one of the polypeptide sequences given in Table A4 of Example 1. Preferably the portion is, in increasing order of preference at least 400, 450, 500, 550, 600, 650, 700, 750, 800, 850, 900, 920 or more consecutive nucleotides in length, the consecutive nucleotides being of any one of the nucleic acid sequences given in Table A4 of Example 1, or of a nucleic acid sequence encoding an orthologue or paralogue of any one of the polypeptide sequences given in Table A4 of Example 1. Preferably, the portion is a portion of a nucleic sequence encoding a polypeptide sequence having in increasing order of preference at least 35%, 40%, 45%, 50%, 55%, 60%, 65%, 70%, 75%, 80%, 85%, 90%, 95%, 98%, 99% or more amino acid sequence identity to the IPPT polypeptide as represented by SEQ ID NO: 144 or to any of the polypeptide sequences given in Table A4 herein. Most preferably, the portion is a portion of the nucleic acid sequence of SEQ ID NO: 143.

[0200] Concerning SHR, portions useful in the methods of the invention, encode an SHR polypeptide as defined herein, and have substantially the same biological activity as the amino acid sequences given in Table A5 of Example 1. Preferably, the portion is a portion of any one of the nucleic acids given in Table A5 of Example 1, or is a portion of a nucleic acid encoding an orthologue or paralogue of any one of the amino acid sequences given in Table A5 of Example 1. Preferably the portion is at least 1000, 1250, 1500, 1600, 1700 consecutive nucleotides in length, the consecutive nucleotides being of any one of the nucleic acid sequences given in Table A5 of Example 1, or of a nucleic acid encoding an orthologue or paralogue of any one of the amino acid sequences given in Table A5 of Example 1. Most preferably the portion is a portion of the nucleic acid of SEQ ID NO: 208. Preferably, the portion encodes a fragment of an amino acid sequence which, when used in the construction of a GRAS phylogenetic tree, such as the one depicted in FIG. 14, clusters with the group of SHR polypeptides comprising the amino acid sequence represented by SEQ ID NO: 209 rather than with any other group.

[0201] Another nucleic acid variant useful in the methods of the invention is a nucleic acid capable of hybridising, under reduced stringency conditions, preferably under stringent conditions, with a nucleic acid encoding a TCP1 or TCP2, or an Epsin-like, or an IPPT, or a SHR polypeptide as defined herein, or with a portion as defined herein.

[0202] According to the present invention, there is provided a method for enhancing yield-related traits in plants, comprising introducing and expressing in a plant a nucleic acid capable of hybridizing to any one of the nucleic acids given in table A of Example 1, or comprising introducing and expressing in a plant a nucleic acid capable of hybridising to a nucleic acid encoding an orthologue, paralogue or homologue of an amino acid encoded by any of the nucleic acid sequences given in table A of Example 1.

[0203] Concerning TCP1 or TCP2 or an Epsine-like-sequences, hybridising sequences useful in the methods of the invention encode a TCP1 or TCP2 or an Epsine-like polypeptide as defined herein, having substantially the same biological activity as the amino acid sequences encoded by the nucleic acid sequences given in table A of Example 1. Preferably, the hybridising sequence is capable of hybridising to any one of the nucleic acids given in table A of Example 1, or to a portion of any of these sequences, a portion being as defined above, or the hybridising sequence is capable of hybridising to a nucleic acid encoding an orthologue or paralogue of any one of the amino acid sequences encoded by the nucleic acid sequences given in table A of Example 1. Concerning TCP1 or TCP2, most preferably, the hybridising sequence is capable of hybridising to a nucleic acid as represented by SEQ ID NO: 1 or to a portion thereof or SEQ ID NO: 3 or to a portion thereof. Concerning Epsine-like sequences, most preferably, the hybridising sequence is capable of hybridising to a nucleic acid as represented by SEQ ID NO: 43 or to a portion thereof.

[0204] Concerning IPPT, hybridising sequences useful in the methods of the invention encode an IPPT polypeptide as defined herein, and have substantially the same biological activity as the polypeptide sequences given in Table A4 of Example 1. Preferably, the hybridising sequence is capable of hybridising to any one of the nucleic acid sequences given in Table A4 of Example 1, or to a portion of any of these sequences, a portion being as defined above, or wherein the hybridising sequence is capable of hybridising to a nucleic acid sequence encoding an orthologue or paralogue of any one of the polypeptide sequences given in Table A4 of Example 1. Preferably, the hybridising sequence is capable of hybridising to a nucleic acid sequence encoding a polypeptide sequence having in increasing order of preference at least 35%, 40%, 45%, 50%, 55%, 60%, 65%, 70%, 75%, 80%, 85%, 90%, 95%, 98%, 99% or more amino acid sequence identity to the IPPT polypeptide as represented by SEQ ID NO: 144 or to any of the polypeptide sequences given in Table A4 herein. Most preferably, the hybridising sequence is capable of hybridising to a nucleic acid sequence as represented by SEQ ID NO: 143 or to a portion thereof.

[0205] Another nucleic acid sequence variant useful in the methods of the invention is a splice variant encoding an IPPT polypeptide as defined hereinabove, a splice variant being as defined herein.

[0206] Concerning SHR, hybridising sequences useful in the methods of the invention encode an SHR polypeptide as defined herein, having substantially the same biological activity as the amino acid sequences given in table A of Example 1. Preferably, the hybridising sequence is capable of hybridising to any one of the nucleic acids given in table A of Example 1, or to a portion of any of these sequences, a portion being as defined above, or the hybridising sequence is capable of hybridising to a nucleic acid encoding an orthologue or paralogue of any one of the amino acid sequences given in table A of Example 1. Most preferably, the hybridising sequence is capable of hybridising to a nucleic acid as represented by SEQ ID NO: 208 or to a portion thereof. Preferably, the hybridising sequence encodes a polypeptide with an amino acid sequence which, when full-length and used in the construction of a GRAS phylogenetic tree, such as the one depicted in FIG. 14, clusters with the group of SHR polypeptides comprising the amino acid sequence represented by SEQ ID NO: 209 rather than with any other group.

[0207] Concerning TCP1 or TCP2, preferably, the hybridising sequence encodes a polypeptide with an amino acid sequence which, when full-length and used in the construction of a phylogenetic tree, such as the one depicted in FIG. 1 or 2, clusters with the group of TCP1 or TCP2 polypeptides comprising the amino acid sequence represented by SEQ ID NO: 2 or 4 rather than with any other group.

[0208] Concerning Epsin-like-sequences, preferably, the hybridising sequence encodes a polypeptide with an amino acid sequence which, when full-length and used in the construction of a phylogenetic tree, such as the one depicted in FIG. 3 (Holstein and Oliviusson, Protoplasma 226, 13-21, 2005), clusters with the group of Epsin-like polypeptides comprising the amino acid sequence represented by SEQ ID NO: 44 rather than with any other group.

[0209] Another nucleic acid variant useful in the methods of the invention is a splice variant encoding a TCP1 or TCP2 or an Epsin-like, or a SHR polypeptide as defined hereinabove, a splice variant being as defined herein.

[0210] According to the present invention, there is provided a method for enhancing yield-related traits in plants, comprising introducing and expressing in a plant a splice variant of any one of the nucleic acid sequences given in table A of Example 1, or a splice variant of a nucleic acid encoding an orthologue, paralogue or homologue of any of the amino acid sequences encoded by the nucleic acid sequences given in table A of Example 1.

[0211] Concerning SHR, there is also provided a method for increasing TKW in plants, comprising introducing and expressing in a plant a splice variant of any one of the nucleic acid sequences given in Table A5 of Example 1, or a splice variant of a nucleic acid encoding an orthologue, paralogue or homologue of any of the amino acid sequences given in Table A5 of Example 1 and growing the plants under non-nutrient limiting conditions.

[0212] Concerning TCP1 or TCP2, preferred splice variants are splice variants of a nucleic acid represented by SEQ ID NO: 1 or 3, or a splice variant of a nucleic acid encoding an orthologue or paralogue of SEQ ID NO: 2 or 4. Preferably, the amino acid sequence encoded by the splice variant, when used in the construction of a phylogenetic tree, such as the one depicted in FIG. 1 or 2, clusters with the group of TCP1 or TCP2 polypeptides comprising the amino acid sequence represented by SEQ ID NO: 2 or 4 rather than with any other group.

[0213] Concerning Epsin-like sequences, preferred splice variants are splice variants of a nucleic acid represented by SEQ ID NO: 43, or a splice variant of a nucleic acid encoding an orthologue or paralogue of SEQ ID NO: 44. Preferably, the amino acid sequence encoded by the splice variant, when used in the construction of a phylogenetic tree, such as the one depicted in FIG. 3 (Holstein and Oliviusson, Protoplasma 226, 13-21, 2005), clusters with the group of Epsin-like polypeptides comprising the amino acid sequence represented by SEQ ID NO: 44 rather than with any other group.

[0214] Concerning IPPT, preferred splice variants are splice variants of a nucleic acid sequence represented by SEQ ID NO: 143, or a splice variant of a nucleic acid sequence encoding an orthologue or paralogue of SEQ ID NO: 144. Preferably, the splice variant is a splice variant of a nucleic acid sequence encoding a polypeptide sequence having in increasing order of preference at least 35%, 40%, 45%, 50%, 55%, 60%, 65%, 70%, 75%, 80%, 85%, 90%, 95%, 98%, 99% or more amino acid sequence identity to the IPPT polypeptide as represented by SEQ ID NO: 144 or to any of the polypeptide sequences given in Table A4 herein.

[0215] Concerning SHR, preferred splice variants are splice variants of a nucleic acid represented by SEQ ID NO: 208, or a splice variant of a nucleic acid encoding an orthologue or paralogue of SEQ ID NO: 209. Preferably, the amino acid sequence encoded by the splice variant, when used in the construction of a GRAS phylogenetic tree, such as the one depicted in FIG. 14, clusters with the group of SHR polypeptides comprising the amino acid sequence represented by SEQ ID NO: 209 rather than with any other group.

[0216] Another nucleic acid variant useful in performing the methods of the invention is an allelic variant of a nucleic acid encoding a TCP1 or TCP2 or an Epsin-like, or an IPPT, or an SHR polypeptide as defined hereinabove, an allelic variant being as defined herein.

[0217] According to the present invention, there is provided a method for enhancing yield-related traits in plants, comprising introducing and expressing in a plant an allelic variant of any one of the nucleic acids given in table A of Example 1, or comprising introducing and expressing in a plant an allelic variant of a nucleic acid encoding an orthologue, paralogue or homologue of any of the amino acid sequences encoded by the nucleic acid sequences given in table A of Example 1.

[0218] Concerning IPPT, according to the present invention, there is provided a method for increasing yield-related traits, comprising introducing and expressing in the seeds of a plant, an allelic variant of any one of the nucleic acid sequences given in table A of Example 1, or comprising introducing and expressing in the seeds of a plant, an allelic variant of a nucleic acid sequence encoding an orthologue, paralogue or homologue of any of the polypeptide sequences given in table A of Example 1.

[0219] Concerning SHR, there is also provided a method for increasing TKW in plants, comprising introducing and expressing in a plant an allelic variant of any one of the nucleic acids given in Table A of Example 1, or comprising introducing and expressing in a plant an allelic variant of a nucleic acid encoding an orthologue, paralogue or homologue of any of the amino acid sequences given in Table A of Example 1, and growing plants under non-nutrient limiting conditions.

[0220] Concerning TCP1 or TCP2, the allelic variants useful in the methods of the present invention have substantially the same biological activity as the TCP1 or TCP2 polypeptide of SEQ ID NO: 2 or 4 and any of the amino acids encoded by the nucleic acid sequences given in Example 1. Allelic variants exist in nature, and encompassed within the methods of the present invention is the use of these natural alleles. Preferably, the allelic variant is an allelic variant of SEQ ID NO: 1 or 3 or an allelic variant of a nucleic acid encoding an orthologue or paralogue of SEQ ID NO: 2 or 4. Preferably, the amino acid sequence encoded by the allelic variant, when used in the construction of a phylogenetic tree, such as the one depicted in FIG. 1 or 2, clusters with the TCP1 or TCP2 polypeptides comprising the amino acid sequence represented by SEQ ID NO: 2 or 4 TCP1 or TCP2 rather than with any other group.

[0221] Concerning Epsin-like sequences, the allelic variants useful in the methods of the present invention have substantially the same biological activity as the Epsin-like polypeptide of SEQ ID NO: 44 and any of the amino acids depicted in Table A3 of Example 1. Allelic variants exist in nature, and encompassed within the methods of the present invention is the use of these natural alleles. Preferably, the allelic variant is an allelic variant of SEQ ID NO: 43 or an allelic variant of a nucleic acid encoding an orthologue or paralogue of SEQ ID NO: 44. Preferably, the amino acid sequence encoded by the allelic variant, when used in the construction of a phylogenetic tree, such as the one depicted in FIG. 3 (Holstein and Oliviusson, Protoplasma 226, 13-21, 2005), clusters with the group of Epsin-like polypeptides comprising the amino acid sequence represented by SEQ ID NO: 44 rather than with any other group.

[0222] Concerning IPPT, the allelic variants useful in the methods of the present invention have substantially the same biological activity as the IPPT polypeptide of SEQ ID NO: 144 and any of the polypeptide sequences depicted in Table A4 of Example 1. Allelic variants exist in nature, and encompassed within the methods of the present invention is the use of these natural alleles. Preferably, the allelic variant is an allelic variant of SEQ ID NO: 143 or an allelic variant of a nucleic acid sequence encoding an orthologue or paralogue of SEQ ID NO: 144. Preferably, the allelic variant is an allelic variant of a polypeptide sequence having in increasing order of preference at least 35%, 40%, 45%, 50%, 55%, 60%, 65%, 70%, 75%, 80%, 85%, 90%, 95%, 98%, 99% or more amino acid sequence identity to the IPPT polypeptide as represented by SEQ ID NO: 144 or to any of the polypeptide sequences given in Table A4 herein.

[0223] Concerning SHR, the allelic variants useful in the methods of the present invention have substantially the same biological activity as the SHR polypeptide of SEQ ID NO: 209 and any of the amino acids depicted in Table A5 of Example 1. Allelic variants exist in nature, and encompassed within the methods of the present invention is the use of these natural alleles. Preferably, the allelic variant is an allelic variant of SEQ ID NO: 208 or an allelic variant of a nucleic acid encoding an orthologue or paralogue of SEQ ID NO: 209. Preferably, the amino acid sequence encoded by the allelic variant, when used in the construction of a GRAS phylogenetic tree, such as the one depicted in FIG. 14, clusters with the SHR polypeptides comprising the amino acid sequence represented by SEQ ID NO: 209 rather than with any other group.

[0224] Gene shuffling or directed evolution may also be used to generate variants of nucleic acids encoding TCP1 or TCP2 or an Epsin-like, or IPPT, or SHR polypeptides as defined above; the term “gene shuffling” being as defined herein.

[0225] According to the present invention, there is provided a method for enhancing yield-related or for increasing TKW traits in plants, comprising introducing and expressing in a plant a variant of any one of the nucleic acid sequences given in table A of Example 1, or comprising introducing and expressing in a plant a variant of a nucleic acid encoding an orthologue, paralogue or homologue of any of the amino acid sequences encoded by the nucleic acid sequences given in table A of Example 1, which variant nucleic acid is obtained by gene shuffling, and growing the plants under non-nutrient limiting conditions.

[0226] Concerning TCP1 or TCP2, preferably, the amino acid sequence encoded by the variant nucleic acid obtained by gene shuffling, when used in the construction of a phylogenetic tree such as the one depicted in FIG. 1 or 2, clusters with the group of TCP1 or TCP2 polypeptides comprising the amino acid sequence represented by SEQ ID NO: 2 or 4 rather than with any other group.

[0227] Concerning Epsin-like sequences, preferably, the amino acid sequence encoded by the variant nucleic acid obtained by gene shuffling, when used in the construction of a phylogenetic tree such as the one depicted in FIG. 3 (Holstein and Oliviusson, Protoplasma 226, 13-21, 2005), clusters with the group of Epsin-like polypeptides comprising the amino acid sequence represented by SEQ ID NO: 44 rather than with any other group.

[0228] Concerning IPPT, preferably, the variant nucleic acid sequence obtained by gene shuffling encodes a polypeptide sequence having in increasing order of preference at least 35%, 40%, 45%, 50%, 55%, 60%, 65%, 70%, 75%, 80%, 85%, 90%, 95%, 98%, 99% or more amino acid sequence identity to the IPPT polypeptide as represented by SEQ ID NO: 144 or to any of the polypeptide sequences given in Table A4 herein.

[0229] Concerning SHR, preferably, the amino acid sequence encoded by the variant nucleic acid obtained by gene shuffling, when used in the construction of a GRAS phylogenetic tree such as the one depicted in FIG. 14, clusters with the group of SHR polypeptides comprising the amino acid sequence represented by SEQ ID NO: 209 rather than with any other group.

[0230] Furthermore, nucleic acid variants may also be obtained by site-directed mutagenesis. Several methods are available to achieve site-directed mutagenesis, the most common being PCR based methods (Current Protocols in Molecular Biology. Wiley Eds.).

[0231] Nucleic acids encoding TCP1 or TCP2 polypeptides may be derived from any natural or artificial source. The nucleic acid may be modified from its native form in composition and/or genomic environment through deliberate human manipulation. Preferably the TCP1 or TCP2 polypeptide-encoding nucleic acid is from a plant, further preferably from a dicotyledonous plant, more preferably from the family Medicago, most preferably the nucleic acid is from Medicago sativa or Medicago truncatula.

[0232] Nucleic acids encoding Epsin-like polypeptides may be derived from any natural or artificial source. The nucleic acid may be modified from its native form in composition and/or genomic environment through deliberate human manipulation. Preferably the Epsin-like polypeptide-encoding nucleic acid is from a plant, further preferably from a dicotyledonous plant, more preferably from the family Brassicaceae, most preferably the nucleic acid is from Arabidopsis thaliana.

[0233] Nucleic acid sequences encoding IPPT polypeptides may be derived from any natural or artificial source. The nucleic acid sequence may be modified from its native form in composition and/or genomic environment through deliberate human manipulation. The nucleic acid sequence encoding an IPPT polypeptide is from the Procaryota domain, preferably from Cyanobacteria, further preferably from the orders Nostocales, Oscillatoriales, Chroococcales, Prochlorales, Gloeobacterales, Pleurocapsales, Stigonematales. More preferably, the nucleic acid sequence encoding an IPPT polypeptide is from Nostoc, Trichodesmium, Anabaena, Acaryochloris, Microcystis, Thermosynechococcus, Synechococcus, Prochlorococcus, Gloeobacter, Synechocystis. Most preferably, the nucleic acid sequence encoding an IPPT polypeptide is from Synechococcus species, in particular from Synechococcus PCC 7942.

[0234] Nucleic acids encoding SHR polypeptides may be derived from any natural or artificial source. The nucleic acid may be modified from its native form in composition and/or genomic environment through deliberate human manipulation. Preferably the SHR polypeptide-encoding nucleic acid is from a plant, further preferably from a dicotyledonous plant, more preferably from the family Brasicaceae, most preferably the nucleic acid is from Arabidopsis thaliana.

[0235] Performance of the methods of the invention gives plants having enhanced yield-related traits. In particular performance of the methods of the invention gives plants having increased yield, especially increased seed yield relative to control plants. The terms “yield” and “seed yield” are described in more detail in the “definitions” section herein.

[0236] Reference herein to enhanced yield-related traits is taken to mean an increase in biomass (weight) of one or more parts of a plant, which may include aboveground (harvestable) parts and/or (harvestable) parts below ground. In particular, such harvestable parts are vegetative plant parts and/or seeds, and performance of the methods of the invention results in plants having increased seed yield relative to the seed yield of control plants.

[0237] Taking corn as an example, a yield increase may be manifested as one or more of the following: increase in the number of plants established per square meter, an increase in the number of ears per plant, an increase in the number of rows, number of kernels per row, kernel weight, thousand kernel weight, ear length/diameter, increase in the seed filling rate (which is the number of filled seeds divided by the total number of seeds and multiplied by 100), among others. Taking rice as an example, a yield increase may manifest itself as an increase in one or more of the following: number of plants per square meter, number of panicles per plant, number of spikelets per panicle, number of flowers (florets) per panicle (which is expressed as a ratio of the number of filled seeds over the number of primary panicles), increase in the seed filling rate (which is the number of filled seeds divided by the total number of seeds and multiplied by 100), increase in thousand kernel weight, among others.

[0238] The present invention provides a method for increasing yield, especially seed yield of plants, relative to control plants, which method comprises modulating expression in a plant of a nucleic acid encoding a TCP1 or TCP2 or an Epsin-like or an IPPT, or an SHR polypeptide as defined herein.

[0239] Since the transgenic plants according to the present invention have increased yield, it is likely that these plants exhibit an increased growth rate (during at least part of their life cycle), relative to the growth rate of control plants at a corresponding stage in their life cycle.

[0240] The increased growth rate may be specific to one or more parts of a plant (including seeds), or may be throughout substantially the whole plant. Plants having an increased growth rate may have a shorter life cycle. The life cycle of a plant may be taken to mean the time needed to grow from a dry mature seed up to the stage where the plant has produced dry mature seeds, similar to the starting material. This life cycle may be influenced by factors such as early vigour, growth rate, greenness index, flowering time and speed of seed maturation. The increase in growth rate may take place at one or more stages in the life cycle of a plant or during substantially the whole plant life cycle. Increased growth rate during the early stages in the life cycle of a plant may reflect enhanced vigour. The increase in growth rate may alter the harvest cycle of a plant allowing plants to be sown later and/or harvested sooner than would otherwise be possible (a similar effect may be obtained with earlier flowering time). If the growth rate is sufficiently increased, it may allow for the further sowing of seeds of the same plant species (for example sowing and harvesting of rice plants followed by sowing and harvesting of further rice plants all within one conventional growing period). Similarly, if the growth rate is sufficiently increased, it may allow for the further sowing of seeds of different plants species (for example the sowing and harvesting of corn plants followed by, for example, the sowing and optional harvesting of soybean, potato or any other suitable plant). Harvesting additional times from the same rootstock in the case of some crop plants may also be possible. Altering the harvest cycle of a plant may lead to an increase in annual biomass production per square meter (due to an increase in the number of times (say in a year) that any particular plant may be grown and harvested). An increase in growth rate may also allow for the cultivation of transgenic plants in a wider geographical area than their wild-type counterparts, since the territorial limitations for growing a crop are often determined by adverse environmental conditions either at the time of planting (early season) or at the time of harvesting (late season). Such adverse conditions may be avoided if the harvest cycle is shortened. The growth rate may be determined by deriving various parameters from growth curves, such parameters may be: T-Mid (the time taken for plants to reach 50% of their maximal size) and T-90 (time taken for plants to reach 90% of their maximal size), amongst others.

[0241] According to a preferred feature of the present invention, performance of the methods of the invention gives plants having an increased growth rate relative to control plants. Therefore, according to the present invention, there is provided a method for increasing the growth rate of plants, which method comprises modulating expression in a plant of a nucleic acid encoding a TCP1 or TCP2 or an Epsin-like, or an IPPT polypeptide as defined herein. Additionally, a method is provided for increasing the growth rate of plants, which method comprises modulating expression in a plant of a nucleic acid encoding a SHR polypeptide as defined herein, and growing the plants under conditions of sub-optimal nutrient availability.

[0242] Enhanced yield-related traits are obtained by performance of the methods of the invention and growing plants under conditions of nutrient deficiency, particularly under conditions of nitrogen deficiency. Nutrient deficiency may result from a lack of nutrients such as nitrogen, phosphates and other phosphorous-containing compounds, potassium, calcium, cadmium, magnesium, manganese, iron and boron, amongst others. According to a preferred feature of the present invention, there is provided a method for enhancing yield-related traits in plants, comprising modulating expression in a plant of a nucleic acid encoding a SHR polypeptide and growing plants under conditions of nitrogen deficiency.

[0243] An increase in yield and/or growth rate occurs whether the plant is under non-stress conditions or whether the plant is exposed to various stresses compared to control plants. Plants typically respond to exposure to stress by growing more slowly. In conditions of severe stress, the plant may even stop growing altogether. Mild stress on the other hand is defined herein as being any stress to which a plant is exposed which does not result in the plant ceasing to grow altogether without the capacity to resume growth. Mild stress in the sense of the invention leads to a reduction in the growth of the stressed plants of less than 40%, 35% or 30%, preferably less than 25%, 20% or 15%, more preferably less than 14%, 13%, 12%, 11% or 10% or less in comparison to the control plant under non-stress conditions. Due to advances in agricultural practices (irrigation, fertilization, pesticide treatments) severe stresses are not often encountered in cultivated crop plants. As a consequence, the compromised growth induced by mild stress is often an undesirable feature for agriculture. Mild stresses are the everyday biotic and/or abiotic (environmental) stresses to which a plant is exposed. Abiotic stresses may be due to drought or excess water, anaerobic stress, salt stress, chemical toxicity, oxidative stress and hot, cold or freezing temperatures. The abiotic stress may be an osmotic stress caused by a water stress (particularly due to drought), salt stress, oxidative stress or an ionic stress. Biotic stresses are typically those stresses caused by pathogens, such as bacteria, viruses, fungi, nematodes, and insects.

[0244] In particular, the methods of the present invention may be performed under non-stress conditions or under conditions of mild drought to give plants having increased yield relative to control plants. As reported in Wang et al. (Planta (2003) 218: 1-14), abiotic stress leads to a series of morphological, physiological, biochemical and molecular changes that adversely affect plant growth and productivity. Drought, salinity, extreme temperatures and oxidative stress are known to be interconnected and may induce growth and cellular damage through similar mechanisms. Rabbani et al. (Plant Physiol (2003) 133: 1755-1767) describes a particularly high degree of “cross talk” between drought stress and high-salinity stress. For example, drought and/or salinisation are manifested primarily as osmotic stress, resulting in the disruption of homeostasis and ion distribution in the cell. Oxidative stress, which frequently accompanies high or low temperature, salinity or drought stress, may cause denaturing of functional and structural proteins. As a consequence, these diverse environmental stresses often activate similar cell signalling pathways and cellular responses, such as the production of stress proteins, up-regulation of anti-oxidants, accumulation of compatible solutes and growth arrest. The term “non-stress” conditions as used herein are those environmental conditions that allow optimal growth of plants. Persons skilled in the art are aware of normal soil conditions and climatic conditions for a given location.

[0245] Concerning IPPT, since diverse environmental stresses activate similar pathways, the exemplification of the present invention with drought stress should not be seen as a limitation to drought stress, but more as a screen to indicate the involvement of IPPT polypeptides as defined above, in increasing yield-related traits relative to control plants grown in comparable stress conditions, in abiotic stresses in general.

[0246] Concerning IPPT, the term “abiotic stress” as defined herein is taken to mean any one or more of: water stress (due to drought or excess water), anaerobic stress, salt stress, temperature stress (due to hot, cold or freezing temperatures), chemical toxicity stress and oxidative stress. According to one aspect of the invention, the abiotic stress is an osmotic stress, selected from water stress, salt stress, oxidative stress and ionic stress. Preferably, the water stress is drought stress. The term salt stress is not restricted to common salt (NaCl), but may be any stress caused by one or more of: NaCl, KCl, LiCl, MgCl2, CaCl2, amongst others.

[0247] Performance of the methods of the invention gives plants grown under non-stress conditions or under mild drought conditions increased yield relative to control plants grown under comparable conditions. Therefore, according to the present invention, there is provided a method for increasing yield in plants grown under non-stress conditions or under mild drought conditions, which method comprises modulating expression in a plant of a nucleic acid encoding a TCP1 or TCP2 or an Epsin-like polypeptide.

[0248] Performance of the methods of the invention gives plants grown under conditions of nutrient deficiency, particularly under conditions of nitrogen deficiency, increased yield relative to control plants grown under comparable conditions. Therefore, according to the present invention, there is provided a method for increasing yield in plants grown under conditions of nutrient deficiency, which method comprises modulating expression in a plant of a nucleic acid encoding a TCP1 or TCP2 or an Epsin-like polypeptide. Nutrient deficiency may result from a lack of nutrients such as nitrogen, phosphates and other phosphorous-containing compounds, potassium, calcium, cadmium, magnesium, manganese, iron and boron, amongst others.

[0249] Concerning IPPT, performance of the methods of the invention gives plants having increased yield-related traits, under abiotic stress conditions relative to control plants grown in comparable stress conditions. Therefore, according to the present invention, there is provided a method for increasing yield-related traits, in plants grown under abiotic stress conditions, which method comprises increasing expression in the seeds of a plant, of a nucleic acid sequence encoding an IPPT polypeptide. According to one aspect of the invention, the abiotic stress is an osmotic stress, selected from one or more of the following: water stress, salt stress, oxidative stress and ionic stress.

[0250] Furthermore, concerning IPPT, performance of the methods of the invention gives plants grown under conditions of reduced nutrient availability, particularly under conditions of reduced nitrogen availability, having increased yield-related traits relative to control plants grown under comparable conditions. Therefore, according to the present invention, there is provided a method for increasing yield-related traits in plants grown under conditions of reduced nutrient availability, preferably reduced nitrogen availability, which method comprises increasing expression in the seeds of a plant, of a nucleic acid sequence encoding an IPPT polypeptide. Reduced nutrient availability may result from a deficiency or excess of nutrients such as nitrogen, phosphates and other phosphorous-containing compounds, potassium, calcium, cadmium, magnesium, manganese, iron and boron, amongst others. Preferably, reduced nutrient availability is reduced nitrogen availability.

[0251] Another example of abiotic environmental stress is the reduced availability of one or more nutrients that need to be assimilated by the plants for growth and development. Because of the strong influence of nutrition utilization efficiency on plant yield and product quality, a huge amount of fertilizer is poured onto fields to optimize plant growth and quality. Productivity of plants ordinarily is limited by three primary nutrients, phosphorous, potassium and nitrogen, which is usually the rate-limiting element in plant growth of these three. Therefore the major nutritional element required for plant growth is nitrogen (N). It is a constituent of numerous important compounds found in living cells, including amino acids, proteins (enzymes), nucleic acids, and chlorophyll. 1.5% to 2% of plant dry matter is nitrogen and approximately 16% of total plant protein. Thus, nitrogen availability is a major limiting factor for crop plant growth and production (Frink et al. (1999) Proc Natl Acad Sci USA 96(4): 1175-1180), and has as well a major impact on protein accumulation and amino acid composition. Therefore, of great interest are crop plants with increased yield-related traits, when grown under nitrogen-limiting conditions.

[0252] The present invention encompasses plants or parts thereof (including seeds) or cells thereof obtainable by the methods according to the present invention. The plants or parts thereof or cells thereof comprise a nucleic acid transgene encoding a TCP1 or TCP2 or an Epsin-like, or an SHR polypeptide as defined above. Concerning IPPT, the plants or parts thereof or cells thereof comprise a nucleic acid transgene encoding an IPPT polypeptide as defined above, operably linked to a seed-specific promoter.

[0253] The invention also provides genetic constructs and vectors to facilitate introduction and/or expression in plants of nucleic acids encoding TCP1 or TCP2 or Epsin-like, or IPPT, or SHR polypeptides. The gene constructs may be inserted into vectors, which may be commercially available, suitable for transforming into plants and suitable for expression of the gene of interest in the transformed cells. The invention also provides use of a gene construct as defined herein in the methods of the invention.

[0254] More specifically, the present invention provides a construct comprising:

(a) a nucleic acid encoding a TCP1 or TCP2 or an Epsin-like, or an IPPT, or an SHR polypeptide as defined above;
(b) one or more control sequences capable of driving expression of the nucleic acid sequence of (a); and optionally
(c) a transcription termination sequence.

[0255] Preferably, the nucleic acid encoding a TCP1 or TCP2 or an Epsin-like, or an IPPT, or SHR polypeptide is as defined above. The term “control sequence” and “termination sequence” are as defined herein.

[0256] Plants are transformed with a vector comprising any of the nucleic acids described above. The skilled artisan is well aware of the genetic elements that must be present on the vector in order to successfully transform, select and propagate host cells containing the sequence of interest. The sequence of interest is operably linked to one or more control sequences (at least to a promoter).

[0257] Advantageously, any type of promoter, whether natural or synthetic, may be used to drive expression of the nucleic acid sequence. A constitutive promoter is particularly useful in the methods. Preferably the constitutive promoter is also a ubiquitous promoter. Concerning IPPT, a seed-specific promoter is particularly useful in the methods. Other organ-specific promoters, for example for preferred expression in leaves, stems, tubers, meristems, are useful in performing the methods of the invention. Developmentally-regulated promoters are also useful in performing the methods of the invention See the “Definitions” section herein for definitions of the various promoter types. See the “Definitions” section herein for definitions of the various promoter types.

[0258] It should be clear that the applicability of the present invention is not restricted to the TCP1 or TCP2 polypeptide-encoding nucleic acid represented by SEQ ID NO: 1 or 3, nor is the applicability of the invention restricted to expression of a TCP1 or TCP2 polypeptide-encoding nucleic acid when driven by a constitutive promoter.

[0259] Concerning TCP1 or TCP2, the constitutive promoter is preferably a GOS2 promoter, preferably a GOS2 promoter from rice. Further preferably the constitutive promoter is represented by a nucleic acid sequence substantially similar to SEQ ID NO: 5, most preferably the constitutive promoter is as represented by SEQ ID NO: 5 (See Table 2b in the “Definitions” section herein for further examples of constitutive promoters). According to another preferred embodiment, the constitutive promoter is preferably a High Mobility Group Protein (HMGP) promoter. Further preferably the constitutive promoter is represented by a nucleic acid sequence substantially similar to SEQ ID NO: 6, most preferably the constitutive promoter is as represented by SEQ ID NO: 6.

[0260] It should also be clear that the applicability of the present invention is not restricted to the Epsin-like polypeptide-encoding nucleic acid represented by SEQ ID NO: 43, nor is the applicability of the invention restricted to expression of an Epsin-like polypeptide-encoding nucleic acid when driven by a constitutive promoter.

[0261] Furthermore, it should be clear that the applicability of the present invention is not restricted to a nucleic acid sequence encoding the IPPT polypeptide, as represented by SEQ ID NO: 143, nor is the applicability of the invention restricted to expression of an IPPT polypeptide-encoding nucleic acid sequence when driven by a seed-specific promoter.

[0262] Also, it should be clear that the applicability of the present invention is not restricted to the SHR polypeptide-encoding nucleic acid represented by SEQ ID NO: 208, nor is the applicability of the invention restricted to expression of a SHR polypeptide-encoding nucleic acid when driven by a constitutive promoter.

[0263] Concerning Epsin-like sequences, the constitutive promoter is preferably a GOS2 promoter, preferably a GOS2 promoter from rice. Further preferably the constitutive promoter is represented by a nucleic acid sequence substantially similar to SEQ ID NO: 45, most preferably the constitutive promoter is as represented by SEQ ID NO: 45. See Table 2 in the “Definitions” section herein for further examples of constitutive promoters.

[0264] Concerning IPPT, preferably, one of the control sequences of a construct is a seed-specific promoter. An example of a seed-specific promoter is a dehydrin promoter, preferably a rice dehydrin promoter, more preferably a dehydrin promoter as represented by SEQ ID NO: 204. Alternatively, the seed-specific promoter is a proteinase inhibitor promoter, preferably a rice proteinase inhibitor promoter, more preferably a proteinase inhibitor promoter as represented by SEQ ID NO: 205.

[0265] Optionally, one or more terminator sequences may be used in the construct introduced into a plant. Additional regulatory elements may include transcriptional as well as translational enhancers. Those skilled in the art will be aware of terminator and enhancer sequences that may be suitable for use in performing the invention. An intron sequence may also be added to the 5′ untranslated region (UTR) or in the coding sequence to increase the amount of the mature message that accumulates in the cytosol, as described in the definitions section. Other control sequences (besides promoter, enhancer, silencer, intron sequences, 3′UTR and/or 5′UTR regions) may be protein and/or RNA stabilizing elements. Such sequences would be known or may readily be obtained by a person skilled in the art.

[0266] The genetic constructs of the invention may further include an origin of replication sequence that is required for maintenance and/or replication in a specific cell type. One example is when a genetic construct is required to be maintained in a bacterial cell as an episomal genetic element (e.g. plasmid or cosmid molecule). Preferred origins of replication include, but are not limited to, the f1-ori and colE1.

[0267] For the detection of the successful transfer of the nucleic acid sequences as used in the methods of the invention and/or selection of transgenic plants comprising these nucleic acids, it is advantageous to use marker genes (or reporter genes). Therefore, the genetic construct may optionally comprise a selectable marker gene. Selectable markers are described in more detail in the “definitions” section herein. The marker genes may be removed or excised from the transgenic cell once they are no longer needed. Techniques for marker removal are known in the art, useful techniques are described above in the definitions section.

[0268] The invention also provides a method for the production of transgenic plants having enhanced yield-related traits relative to control plants, comprising introduction and expression in a plant of any nucleic acid encoding a TCP1 or TCP2 or an Epsin-like polypeptide as defined hereinabove.

[0269] The invention also provides a method for the production of transgenic plants having enhanced yield-related traits relative to control plants, comprising introduction and expression in a plant of any nucleic acid encoding an SHR polypeptide as defined hereinabove and growing the plants under conditions of sub-optimal nutrient availability.

[0270] More specifically, the present invention provides a method for the production of transgenic plants having increased enhanced yield-related traits, particularly increased (seed) yield, which method comprises:

(i) introducing and expressing in a plant or plant cell a TCP1 or TCP2 polypeptide-encoding nucleic acid; and
(ii) cultivating the plant cell under conditions promoting plant growth and development.

[0271] The nucleic acid of (i) may be any of the nucleic acids capable of encoding a TCP1 or TCP2 polypeptide as defined herein.

[0272] Concerning Epsin-like sequences, the present invention provides a method for the production of transgenic plants having increased enhanced yield-related traits, particularly increased biomass and/or increased seed yield, which method comprises:

(i) introducing and expressing in a plant or plant cell an Epsin-like polypeptide-encoding nucleic acid; and
(ii) cultivating the plant cell under conditions promoting plant growth and development.

[0273] The nucleic acid of (i) may be any of the nucleic acids capable of encoding an Epsin-like polypeptide as defined herein.

[0274] In another embodiment, the invention provides a method for the production of transgenic plants having increased yield-related traits relative to control plants, comprising introduction and expression in the seeds of a plant, of any nucleic acid sequence encoding an IPPT polypeptide as defined hereinabove.

[0275] Concerning IPPT, more specifically, the present invention provides a method for the production of transgenic plants having increased yield-related traits relative to control plants, which method comprises:
[0276] (i) introducing and expressing in a plant, plant part, or plant cell a nucleic acid sequence encoding an IPPT polypeptide, under the control of seed-specific promoter; and
[0277] (ii) cultivating the plant cell, plant part or plant under conditions promoting plant growth and development.

[0278] The nucleic acid sequence of (i) may be any of the nucleic acid sequences capable of encoding an IPPT polypeptide as defined herein.

[0279] In yet another embodiment, the present invention provides a method for the production of transgenic plants having enhanced yield-related traits, particularly increased (seed) yield, which method comprises:
[0280] (i) introducing and expressing in a plant or plant cell an SHR polypeptide-encoding nucleic acid; and
[0281] (ii) cultivating the plant cell under conditions of sub-optimal nutrient availability.

[0282] Concerning SHR, the invention also provides a method for the production of transgenic plants having increased TKW relative to control plants, comprising introduction and expression in a plant of any nucleic acid encoding an SHR polypeptide as defined hereinabove, and growing the plants under non-nutrient limiting conditions. More specifically, the present invention provides a method for the production of transgenic plants having increased TKW, which method comprises:
[0283] (i) introducing and expressing in a plant or plant cell an SHR polypeptide-encoding nucleic acid; and
[0284] (ii) cultivating the plant cell under non-nutrient limiting conditions.

[0285] The nucleic acid of (i) may be any of the nucleic acids capable of encoding an SHR polypeptide as defined herein.

[0286] The nucleic acid may be introduced directly into a plant cell or into the plant itself (including introduction into a tissue, organ or any other part of a plant). According to a preferred feature of the present invention, the nucleic acid is preferably introduced into a plant by transformation. The term “transformation” is described in more detail in the “definitions” section herein.

[0287] The genetically modified plant cells can be regenerated via all methods with which the skilled worker is familiar. Suitable methods can be found in the abovementioned publications by S. D. Kung and R. Wu, Potrykus or Höfgen and Willmitzer.

[0288] Generally after transformation, plant cells or cell groupings are selected for the presence of one or more markers which are encoded by plant-expressible genes co-transferred with the gene of interest, following which the transformed material is regenerated into a whole plant. To select transformed plants, the plant material obtained in the transformation is, as a rule, subjected to selective conditions so that transformed plants can be distinguished from untransformed plants. For example, the seeds obtained in the above-described manner can be planted and, after an initial growing period, subjected to a suitable selection by spraying. A further possibility consists in growing the seeds, if appropriate after sterilization, on agar plates using a suitable selection agent so that only the transformed seeds can grow into plants. Alternatively, the transformed plants are screened for the presence of a selectable marker such as the ones described above.

[0289] Following DNA transfer and regeneration, putatively transformed plants may also be evaluated, for instance using Southern analysis, for the presence of the gene of interest, copy number and/or genomic organisation. Alternatively or additionally, expression levels of the newly introduced DNA may be monitored using Northern and/or Western analysis, both techniques being well known to persons having ordinary skill in the art.

[0290] The generated transformed plants may be propagated by a variety of means, such as by clonal propagation or classical breeding techniques. For example, a first generation (or T1) transformed plant may be selfed and homozygous second-generation (or T2) transformants selected, and the T2 plants may then further be propagated through classical breeding techniques. The generated transformed organisms may take a variety of forms. For example, they may be chimeras of transformed cells and non-transformed cells; clonal transformants (e.g., all cells transformed to contain the expression cassette); grafts of transformed and untransformed tissues (e.g., in plants, a transformed rootstock grafted to an untransformed scion).

[0291] The present invention clearly extends to any plant cell or plant produced by any of the methods described herein, and to all plant parts and propagules thereof. The present invention extends further to encompass the progeny of a primary transformed or transfected cell, tissue, organ or whole plant that has been produced by any of the aforementioned methods, the only requirement being that progeny exhibit the same genotypic and/or phenotypic characteristic(s) as those produced by the parent in the methods according to the invention.

[0292] The invention also includes host cells containing an isolated nucleic acid encoding a TCP1 or TCP2, or an Epsin-like, or an SHR polypeptide as defined hereinabove. Preferred host cells according to the invention are plant cells. Concerning IPPT, the invention also includes host cells containing an isolated nucleic acid sequence encoding an IPPT polypeptide as defined hereinabove, operably linked to a seed-specific promoter. Host plants for the nucleic acids or the vector used in the method according to the invention, the expression cassette or construct or vector are, in principle, advantageously all plants, which are capable of synthesizing the polypeptides used in the inventive method.

[0293] The methods of the invention are advantageously applicable to any plant. Plants that are particularly useful in the methods of the invention include all plants which belong to the superfamily Viridiplantae, in particular monocotyledonous and dicotyledonous plants including fodder or forage legumes, ornamental plants, food crops, trees or shrubs. According to a preferred embodiment of the present invention, the plant is a crop plant. Examples of crop plants include soybean, sunflower, canola, alfalfa, rapeseed, cotton, tomato, potato and tobacco. Further preferably, the plant is a monocotyledonous plant. Examples of monocotyledonous plants include sugarcane. More preferably the plant is a cereal. Examples of cereals include rice, maize, wheat, barley, millet, rye, triticale, sorghum and oats.

[0294] The invention also extends to harvestable parts of a plant such as, but not limited to seeds, leaves, fruits, flowers, stems, roots, rhizomes, tubers and bulbs. The invention furthermore relates to products derived, preferably directly derived, from a harvestable part of such a plant, such as dry pellets or powders, oil, fat and fatty acids, starch or proteins.

[0295] Concerning IPPT, the invention also extends to harvestable parts of a plant comprising an isolated nucleic acid sequence encoding an IPPT (as defined hereinabove) operably linked to a seed-specific promoter, such as, but not limited to seeds, leaves, fruits, flowers, stems, rhizomes, tubers and bulbs. The invention furthermore relates to products derived, preferably directly derived, from a harvestable part of such a plant, such as dry pellets or powders, oil, fat and fatty acids, starch or proteins. Methods for increasing expression of nucleic acid sequences or genes, or gene products, are well documented in the art and examples are provided in the definitions section.

[0296] According to a preferred feature of the invention, the modulated expression is increased expression. Methods for increasing expression of nucleic acids or genes, or gene products, are well documented in the art and examples are provided in the definitions section.

[0297] As mentioned above, a preferred method for modulating expression of a nucleic acid encoding a TCP1 or TCP2 or an Epsin-like, or an SHR polypeptide is by introducing and expressing in a plant a nucleic acid encoding a TCP1 or TCP2 or an Epsin-like, or an SHR polypeptide; or a preferred method for increasing expression of a nucleic acid sequence encoding an IPPT polypeptide is by introducing and expressing in the seeds of a plant, a nucleic acid sequence encoding an IPPT polypeptide; however the effects of performing the method, i.e. enhancing yield-related traits may also be achieved using other well known techniques, including but not limited to T-DNA activation tagging, TILLING, homologous recombination. A description of these techniques is provided in the definitions section.

[0298] The present invention also encompasses use of nucleic acids encoding TCP1 or TCP2 or an Epsin-like, or an SHR polypeptides as described herein and use of these TCP1 or TCP2 or an Epsin-like, or an SHR polypeptides in enhancing any of the aforementioned yield-related traits in plants. The present invention also encompasses use of nucleic acid sequences encoding IPPT polypeptides as described herein and use of these IPPT polypeptides in increasing any of the aforementioned yield-related traits in plants, under normal growth conditions, under abiotic stress growth (preferably osmotic stress growth conditions) conditions, and under growth conditions of reduced nutrient availability, preferably under conditions of reduced nitrogen availability.

[0299] Nucleic acids encoding TCP1 or TCP2 or an Epsin-like, or an IPPT, or an SHR polypeptide described herein, or the TCP1 or TCP2 or the Epsin-like, or the IPPT, or an SHR polypeptides themselves, may find use in breeding programmes in which a DNA marker is identified which may be genetically linked to a TCP1 or TCP2 or an Epsin-like, or an IPPT, or an SHR polypeptide-encoding gene. The nucleic acids/genes, or the TCP1 or TCP2 or the Epsin-like, or the IPPT, or an SHR polypeptides themselves may be used to define a molecular marker. This DNA or protein marker may then be used in breeding programmes to select plants having enhanced yield-related traits, or increased TKW as defined hereinabove in the methods of the invention.

[0300] Allelic variants of a TCP1 or TCP2 or an Epsin-like, or an SHR polypeptide-encoding nucleic acid/gene may also find use in marker-assisted breeding programmes. Such breeding programmes sometimes require introduction of allelic variation by mutagenic treatment of the plants, using for example EMS mutagenesis; alternatively, the programme may start with a collection of allelic variants of so called “natural” origin caused unintentionally. Identification of allelic variants then takes place, for example, by PCR. This is followed by a step for selection of superior allelic variants of the sequence in question and which give increased yield. Selection is typically carried out by monitoring growth performance of plants containing different allelic variants of the sequence in question. Growth performance may be monitored in a greenhouse or in the field. Further optional steps include crossing plants in which the superior allelic variant was identified with another plant. This could be used, for example, to make a combination of interesting phenotypic features.

[0301] Allelic variants of a gene/nucleic acid sequence encoding an IPPT polypeptide may also find use in marker-assisted breeding programmes. Such breeding programmes sometimes require introduction of allelic variation by mutagenic treatment of the plants, using for example EMS mutagenesis; alternatively, the programme may start with a collection of allelic variants of so called “natural” origin caused unintentionally. Identification of allelic variants then takes place, for example, by PCR. This is followed by a step for selection of superior allelic variants of the sequence in question and which give increased yield-related traits. Selection is typically carried out by monitoring growth performance of plants containing different allelic variants of the sequence in question. Growth performance may be monitored in a greenhouse or in the field. Further optional steps include crossing plants in which the superior allelic variant was identified with another plant. This could be used, for example, to make a combination of interesting phenotypic features.

[0302] Nucleic acids encoding TCP1 or TCP2 or Epsin-like, or an IPPT, or an SHR polypeptides may also be used as probes for genetically and physically mapping the genes that they are a part of, and as markers for traits linked to those genes. Such information may be useful in plant breeding in order to develop lines with desired phenotypes. Such use of TCP1 or TCP2 or an Epsin-like, or an IPPT, or an SHR polypeptide-encoding nucleic acids requires only a nucleic acid sequence of at least 15 nucleotides in length. The TCP1 or TCP2 or an IPPT, or the Epsin-like, or an SHR polypeptide-encoding nucleic acids may be used as restriction fragment length polymorphism (RFLP) markers. Southern blots (Sambrook J, Fritsch E F and Maniatis T (1989) Molecular Cloning, A Laboratory Manual) of restriction-digested plant genomic DNA may be probed with the TCP1 or TCP2 or the Epsin-like, or an IPPT, or an SHR-encoding nucleic acids. The resulting banding patterns may then be subjected to genetic analyses using computer programs such as MapMaker (Lander et al. (1987) Genomics 1: 174-181) in order to construct a genetic map. In addition, the nucleic acids may be used to probe Southern blots containing restriction endonuclease-treated genomic DNAs of a set of individuals representing parent and progeny of a defined genetic cross. Segregation of the DNA polymorphisms is noted and used to calculate the position of the TCP1 or TCP2 or the Epsin-like, or an IPPT, or an SHR polypeptide-encoding nucleic acid in the genetic map previously obtained using this population (Botstein et al. (1980) Am. J. Hum. Genet. 32:314-331).

[0303] The production and use of plant gene-derived probes for use in genetic mapping is described in Bernatzky and Tanksley (1986) Plant Mol. Biol. Reporter 4: 37-41. Numerous publications describe genetic mapping of specific cDNA clones using the methodology outlined above or variations thereof. For example, F2 intercross populations, backcross populations, randomly mated populations, near isogenic lines, and other sets of individuals may be used for mapping. Such methodologies are well known to those skilled in the art.

[0304] The nucleic acid probes may also be used for physical mapping (i.e., placement of sequences on physical maps; see Hoheisel et al. In: Non-mammalian Genomic Analysis: A Practical Guide, Academic press 1996, pp. 319-346, and references cited therein).

[0305] In another embodiment, the nucleic acid probes may be used in direct fluorescence in situ hybridisation (FISH) mapping (Trask (1991) Trends Genet. 7:149-154). Although current methods of FISH mapping favour use of large clones (several kb to several hundred kb; see Laan et al. (1995) Genome Res. 5:13-20), improvements in sensitivity may allow performance of FISH mapping using shorter probes.

[0306] A variety of nucleic acid amplification-based methods for genetic and physical mapping may be carried out using the nucleic acids. Examples include allele-specific amplification (Kazazian (1989) J. Lab. Clin. Med 11:95-96), polymorphism of PCR-amplified fragments (CAPS; Sheffield et al. (1993) Genomics 16:325-332), allele-specific ligation (Landegren et al. (1988) Science 241:1077-1080), nucleotide extension reactions (Sokolov (1990) Nucleic Acid Res. 18:3671), Radiation Hybrid Mapping (Walter et al. (1997) Nat. Genet. 7:22-28) and Happy Mapping (Dear and Cook (1989) Nucleic Acid Res. 17:6795-6807). For these methods, the sequence of a nucleic acid is used to design and produce primer pairs for use in the amplification reaction or in primer extension reactions. The design of such primers is well known to those skilled in the art. In methods employing PCR-based genetic mapping, it may be necessary to identify DNA sequence differences between the parents of the mapping cross in the region corresponding to the instant nucleic acid sequence. This, however, is generally not necessary for mapping methods.

[0307] The methods according to the present invention result in plants having enhanced yield-related traits, as described hereinbefore. These traits may also be combined with other economically advantageous traits, such as further yield-enhancing traits, tolerance to other abiotic and biotic stresses, tolerance to herbicides, insecticides, traits modifying various architectural features and/or biochemical and/or physiological features.

### DESCRIPTION OF FIGURES

[0308] The present invention will now be described with reference to the following figures in which:

[0309] FIG. 1 is a multiple alignment of TCP1 polypeptides with the TCP domain and Domain A, B and C boxed.

[0310] FIG. 2 is a multiple alignment of TCP2 polypeptides with the TCP domain and Domains 1, 2, 3, 4 and 5 boxed.

[0311] FIG. 3 represents the domain structure of SEQ ID NO: 44 with the ENTH domain as identified in SMART indicated in bold and the conserved motifs 1 to 5 underlined.

[0312] FIG. 4 represents a multiple alignment of various Epsin-like protein sequences. The database accession numbers are used as identifiers

[0313] FIG. 5 shows a phylogenetic tree of eukaryotic proteins comprising an ENTH or ANTH domain (Holstein and Oliviusson 2005). The amino-terminal part of the proteins (200 amino acids) were aligned using ClustalW 1.82 and the output was used in DrawTree (PHYLIP package). SEQ ID NO: 44 clusters in the group of the plant ENTHs.

[0314] FIG. 6 represents the binary vector for increased expression in Oryza sativa of an Epsin-like-encoding nucleic acid under the control of a rice GOS2 promoter (pGOS2)

[0315] FIG. 7 details examples of sequences useful in performing the methods according to the present invention.

[0316] FIG. 8 schematically represents the two major cytokinin biosynthetic routes: (a) the adenylate-IPT route, using AMP, ADP, or ATP, and DMAPP or HMBDP, and (b) the tRNA-IPT route using tRNA and DMAPP. According to Yevdakova and von Schwartzenberg (2007) Planta 226:683-695.

[0317] FIG. 9 shows a detailed model of isoprenoid cytokinin biosynthesis pathways, according to Sakakibara (2006) Annu Rev Plant Biol 57. 431-449. The tRNA-IPT is indicated by a black arrow in the top right corner, the specific final cytokinin product (cZ) of that route is also indicated by a black arrow in the bottom right corner.

[0318] FIG. 10 shows an AlignX (from Vector NTI 10.3, Invitrogen Corporation) multiple sequence alignment of the IPPT polypeptides from Table A4. The N-terminal ATP/GTP-binding site motif A (P-loop) as represented by SEQ ID NO: 199, the Conserved motif I DSR(Q/L)(V/L/I) as represented by SEQ ID NO: 200, the Conserved motif II (N/D/S/T)(I/V)GTAKP(T/S) as represented by SEQ ID NO: 201, the Conserved motif III L(V/A/I)GG(S/T)GLY as represented by SEQ ID NO:202, and the Conserved motif IV F/Y/L)AK(R/K/Q)Q(R/K/M)TWFR, are boxed. The putative zinc finger motif C2H2 (C-X2-C-X(12,18)-H-X5-H found in eukaryotic tRNA-IPTs is marked with a bracket, and the conserved Cys and His residues therein are boxed.

[0319] FIG. 11 shows the binary vector for increased expression in the seeds of Oryza sativa of a nucleic acid sequence encoding an IPPT polypeptide under the control of either a dehydrin seed-specific promoter, or of a proteinase inhibitor seed-specific promoter from rice.

[0320] FIG. 12 details examples of sequences useful in performing the methods according to the present invention.

[0321] FIG. 13 shows the structure of GRAS proteins with the 5 motifs typical to this family

[0322] FIG. 14: Neighbour-joining tree of GRAS and SHR proteins. GRAS proteins from rice, Arabidopsis and SHR-related proteins from the various organisms were aligned using MUSCLE. A neighbour-joining tree was produced with CLUSTALX. Bootstrap analysis was performed for 100 iterations. The bootstrap support is shown only for the main nodes. The SHR related proteins are indicated. A. thaliana: Arabidopsis thaliana; E. grandis: Eucalyptus grandis; G. max: Glycine max; L. sativa: Latuca sativa; M trucatula: Medicago truncatula; O. sativa: Oryza sativa; P. taeda: Pinus taeda; P. patens: Physcomitrella patens; P. trichocarpa: Populus trichocarpa; R. communis: Ricinus communis; S. tuberosum: Solanum tuberosum; V. vinifera: Vitis vinifera; Z. mays: Zea mays; —part: partial sequence.

[0323] FIG. 15 shows the percentage sequence identity for members of the GRAS family with entries above the horizontal line indicating members of the SHR family. The SHR branch is highly conserved in land plants, including mosses and gymnosperms. The SHR proteins in that branch share more than 41% identity with each other, compared with less than 33% with the members of the other branches.

[0324] FIG. 16 represents the binary vector for increased expression in Oryza sativa of a SHR-encoding nucleic acid under the control of a rice GOS2 promoter (pGOS2)

[0325] FIG. 17 details examples of sequences useful in performing the methods according to the present invention.

[0326] In one embodiment the invention relates to subject mater summarized as follows:

[0327] Item 1: Method for enhancing yield-related traits in plants relative to control plants, comprising modulating expression of a nucleic acid encoding a TCP1 or a TCP2 polypeptide in a plant, said TCP1 polypeptide comprising:

(i) a TCP domain having in increasing order of preference at least 50%, 55%, 60%, 65%, 70%, 75%, 80%, 85%, 90%, 95% or more sequence identity to the TCP domain of any one of the sequences indicated in FIG. 1; and
(ii) a domain having in increasing order of preference at least 50%, 55%, 60%, 65%, 70%, 75%, 80%, 85%, 90%, 95% or more sequence identity to Domain A of any one of the sequences indicated in FIG. 1; and
(iii) a domain having in increasing order of preference at least 50%, 55%, 60%, 65%, 70%, 75%, 80%, 85%, 90%, 95% or more sequence identity to Domain B of any one of the sequences indicated in FIG. 1; and
(iv) a domain having in increasing order of preference at least 50%, 55%, 60%, 65%, 70%, 75%, 80%, 85%, 90%, 95% or more sequence identity to Domain C of any one of the sequences indicated in FIG. 1,
and said TCP2 polypeptide comprising:
(i) a TCP domain having in increasing order of preference at least 50%, 55%, 60%, 65%, 70%, 75%, 80%, 85%, 90%, 95% or more sequence identity to the TCP domain of any of the sequences indicated in FIG. 2; and
(ii) a domain having in increasing order of preference at least 50%, 55%, 60%, 65%, 70%, 75%, 80%, 85%, 90%, 95% or more sequence identity to Domain 1 of any of the sequences indicated in FIG. 2; and
(iii) a domain having in increasing order of preference at least 50%, 55%, 60%, 65%, 70%, 75%, 80%, 85%, 90%, 95% or more sequence identity to Domain 2 of any of the sequences indicated in FIG. 2; and
(iv) a domain having in increasing order of preference at least 50%, 55%, 60%, 65%, 70%, 75%, 80%, 85%, 90%, 95% or more sequence identity to Domain 3 of any of the sequences indicated in FIG. 2.

[0328] Item 2: Method according to Item 1, wherein said TCP2 polypeptide comprises:

(v) a domain having in increasing order of preference at least 50%, 55%, 60%, 65%, 70%, 75%, 80%, 85%, 90%, 95% or more sequence identity to Domain 4 of any of the sequences indicated in FIG. 2;
(vi) a domain having in increasing order of preference at least 50%, 55%, 60%, 65%, 70%, 75%, 80%, 85%, 90%, 95% or more sequence identity to Domain 5 of any of the sequences indicated in FIG. 2.

[0329] Item 3: Method according to Item 1 or 2, wherein said TCP1 polypeptide, when used in the construction of a TCP phylogenetic tree, such as the one depicted in FIG. 1, tends to cluster with the clade of TCP polypeptides comprising the polypeptide sequence as represented by SEQ ID NO: 2 rather than with any other TCP clade.

[0330] Item 4: Method according to Item 1 or 2, wherein said TCP2 polypeptide, when used in the construction of a TCP phylogenetic tree, such as the one depicted in FIG. 2, tends to cluster with the clade of TCP polypeptides comprising the polypeptide sequence as represented by SEQ ID NO: 4 rather than with any other TCP clade.

[0331] Item 5: Method according to any one of the preceding Items, wherein said nucleic acid sequence encodes an orthologue or paralogue of SEQ ID NO: 2 or 4.

[0332] Item 6: Method according to any one of the preceding Items, wherein said modulated expression is increased expression of a nucleic acid encoding a TCP1 or a TCP2 polypeptide.

[0333] Item 7: Method according to Item 6, wherein said increased expression is effected by any one or more of T-DNA activation tagging, TILLING, or homologous recombination.

[0334] Item 8: Method according to Item 6, wherein said increased expression is effected by introducing and expressing in a plant a nucleic acid sequence encoding a TCP1 or a TCP2 polypeptide.

[0335] Item 9: Method according to any one of the preceding Items, wherein said enhanced yield-related traits comprise increased seed weight relative to control plants.

[0336] Item 10: Method according to Items 8 or 9, wherein said nucleic acid sequence is operably linked to a constitutive promoter, preferably to a HMGP (High Mobility Group Protein) promoter or to a GOS2 promoter.

[0337] Item 11: Method according to any one of Items 7 to 9, wherein said nucleic acid sequence encoding a TCP1 or TCP2 polypeptide is preferably of plant origin, further preferably from a dicotyledonous plant, more preferably from the Medicago family, most preferably from Medicao sativa or Medicago truncatula.

[0338] Item 12: Plant or part thereof including seeds obtainable by a method according to any one of Items 1 to 11, wherein said plant or part thereof comprises a nucleic acid transgene encoding a TCP1 or a TCP2 polypeptide.

[0339] Item 13: Construct comprising:

(i) nucleic acid sequence encoding a TCP1 or a TCP2 polypeptide;
(ii) one or more control sequences capable of driving expression of the nucleic acid sequence of (i); and optionally
(iii) a transcription termination sequence.

[0340] Item 14: Construct according to Item 13, wherein said one or more control sequences is at least a constitutive promoter, preferably an HMGP or GOS2 promoter.

[0341] Item 15: Use of a construct according to Items 13 or 14 for making plants having increased yield, particularly seed yield, relative to control plants.

[0342] Item 16: Plant, plant part, or plant cell transformed with a construct according to Items 13 or 14.

[0343] Item 17: Method for the production of a transgenic plant having increased seed yield relative to control plants, which method comprises:

(i) introducing and expressing in a plant or plant cell a nucleic acid sequence encoding a TCP1 or a TCP2 polypeptide; and
(ii) cultivating the plant cell under conditions promoting plant growth and development.

[0344] Item 18: Transgenic plant having increased yield, particularly increased seed yield, relative to control plants, said increased yield resulting from increased expression of a nucleic acid encoding a TCP1 or a TCP2 polypeptide, or a transgenic plant cell derived from said transgenic plant.

[0345] Item 19: Transgenic plant according to Item 18, wherein said increased seed yield is one or more of the following: (i) increased seed weight; (ii) increased harvest index; or (iii) increased Thousand Kernel Weight, (iv) increased number of flowers per panicle, (v) increased fill rate, (vi) increased number of filled seeds.

[0346] Item 20: Transgenic plant according to Item 12, 16, 18 or 19, wherein said plant is a crop plant or a monocot or a cereal, such as rice, maize, wheat, barley, millet, rye, sorghum and oats, or a transgenic plant cell derived from said transgenic plant.

[0347] Item 21: Harvestable parts of a plant according to Item 20, wherein said harvestable parts are preferably seeds.

[0348] Item 22: Products derived from a plant according to Item 20 and/or from harvestable parts of a plant according to Item 21.

[0349] Item 23: Use of a nucleic acid encoding a TCP1 or TCP2 polypeptide in increasing yield, particularly seed yield in plants.

[0350] Item 24: A method for enhancing yield-related traits in plants relative to control plants, comprising modulating expression in a plant of a nucleic acid encoding an Epsin-like polypeptide, wherein said Epsin-like polypeptide comprises an ENTH domain.

[0351] Item 25: Method according to Item 24, wherein said Epsin-like polypeptide comprises two or more of the following motifs:

### (i) Motif 1: (V/I)(L/R)(D/E)AT(S/D/N)(N/D/E/S)E(P/S)WGPHG(T/S/E) (SEQ ID NO: 48),

### (ii) Motif 2: F(Q/E)(Y/F)(I/L/V/R/K)(D/E)(S/P/A)(S/G/N/Q/R)G(R/K)D(Q/V/A/H/E)G(S/N/L/I/V)NVR (SEQ ID NO: 49),

[0352] (iii) Motif 3: (E/S/A/Q)(V/I/E/A)R(Q/E/D/N)KA(A/L/V/E)(A/V/S/R/K)(N/T)(R/A)(D/E/N/G)K (SEQ ID NO: 50)

### (iv) Motif 4: WAD(T/S)LSRGL(V/I) (SEQ ID NO: 51)

### (v) Motif 5: L(A/S)D(I/V)G(I/V)(D/V)(F/G)(D/E/P/G) (SEQ ID NO: 52)

[0353] Item 26: Method according to Item 24 or 25, wherein said modulated expression is effected by introducing and expressing in a plant a nucleic acid encoding an Epsin-like polypeptide.

[0354] Item 27: Method according to any preceding Item 24 to 26, wherein said nucleic acid encoding an Epsin-like polypeptide encodes any one of the proteins listed in Table A or is a portion of such a nucleic acid, or a nucleic acid capable of hybridising with such a nucleic acid.

[0355] Item 28: Method according to any preceding Item 24 to 27, wherein said nucleic acid sequence encodes an orthologue or paralogue of any of the proteins given in Table A.

[0356] Item 29: Method according to any preceding Item 24 to 28, wherein said enhanced yield-related traits comprise increased yield, preferably increased biomass and/or increased seed yield relative to control plants.

[0357] Item 30: Method according to any one of Items 24 to 29, wherein said enhanced yield-related traits are obtained under non-stress conditions.

[0358] Item 31: Method according to any one of Items 24 to 29, wherein said enhanced yield-related traits are obtained under conditions of mild drought.

[0359] Item 32: Method according to any one of Items 26 to 31, wherein said nucleic acid is operably linked to a constitutive promoter, preferably to a GOS2 promoter, most preferably to a GOS2 promoter from rice.

[0360] Item 33: Method according to any preceding Item 24 to 32, wherein said nucleic acid encoding an Epsin-like polypeptide is of plant origin, preferably from a dicotyledonous plant, further preferably from the family Brassicaceae, more preferably from the genus Arabidopsis, most preferably from Arabidopsis thaliana.

[0361] Item 34: Plant or part thereof, including seeds, obtainable by a method according to any preceding Item 24 to 33, wherein said plant or part thereof comprises a recombinant nucleic acid encoding an Epsin-like polypeptide.

[0362] Item 35: Construct comprising:

(i) nucleic acid encoding an Epsin-like polypeptide as defined in Items 24 or 25;
(ii) one or more control sequences capable of driving expression of the nucleic acid sequence of (a); and optionally
(iii) a transcription termination sequence.

[0363] Item 36: Construct according to Item 35, wherein one of said control sequences is a constitutive promoter, preferably a GOS2 promoter, most preferably a GOS2 promoter from rice.

[0364] Item 37: Use of a construct according to Item 35 or 36 in a method for making plants having increased yield, particularly increased seed yield relative to control plants.

[0365] Item 38: Plant, plant part or plant cell transformed with a construct according to Item 35 or 36.

[0366] Item 39: Method for the production of a transgenic plant having increased yield, particularly increased biomass and/or increased seed yield relative to control plants, comprising:

(i) introducing and expressing in a plant a nucleic acid encoding an Epsin-like polypeptide as defined in Item 24 or 25; and
(ii) cultivating the plant cell under conditions promoting plant growth and development.

[0367] Item 40: Transgenic plant having increased yield, particularly increased biomass and/or increased seed yield, relative to control plants, resulting from modulated expression of a nucleic acid encoding an Epsin-like polypeptide as defined in Item 24 or 25, or a transgenic plant cell derived from said transgenic plant.

[0368] Item 41: Transgenic plant according to Item 34, 38 or 40, or a transgenic plant cell derived thereof, wherein said plant is a crop plant or a monocot or a cereal, such as rice, maize, wheat, barley, millet, rye, triticale, sorghum and oats.

[0369] Item 42: Harvestable parts of a plant according to Item 41, wherein said harvestable parts are seeds.

[0370] Item 43: Products derived from a plant according to Item 41 and/or from harvestable parts of a plant according to Item 42.

[0371] Item 44: Use of a nucleic acid encoding an Epsin-like polypeptide in increasing yield, particularly in increasing seed yield in plants, relative to control plants.

[0372] Item 45: An isolated nucleic acid molecule comprising a nucleic acid molecule selected from the group consisting of:

a) a nucleic acid molecule encoding the polypeptide shown in SEQ ID NO:112, SEQ ID NO:138 and SEQ ID NO:142;
b) a nucleic acid molecule shown in SEQ ID NO:111, SEQ ID NO:137 and SEQ ID NO:141;
c) a nucleic acid molecule, which, as a result of the degeneracy of the genetic code, can be derived from a polypeptide sequence depicted in SEQ ID NO:112, SEQ ID NO:138 and SEQ ID NO:142 and confers enhanced yield-related traits in plants relative to control plants;
d) a nucleic acid molecule having, in increasing order of preference, at least 25%, 26%, 27%, 28%, 29%, 30%, 31%, 32%, 33%, 34%, 35%, 36%, 37%, 38%, 39%, 40%, 41%, 42%, 43%, 44%, 45%, 46%, 47%, 48%, 49%, 50%, 51%, 52%, 53%, 54%, 55%, 56%, 57%, 58%, 59%, 60%, 61%, 62%, 63%, 64%, 65%, 66%, 67%, 68%, 69%, 70%, 71%, 72%, 73%, 74%, 75%, 76%, 77%, 78%, 79%, 80%, 81%, 82%, 83%, 84%, 85%, 86%, 87%, 88%, 89%, 90%, 91%, 92%, 93%, 94%, 95%, 96%, 97%, 98%, or 99% or more sequence identity to any one of the amino acid sequences given in SEQ ID NO:111, SEQ ID NO:137 and SEQ ID NO:141 and confers enhanced yield-related traits in plants relative to control plants;
e) a nucleic acid molecule encoding a polypeptide, in increasing order of preference, at least 25%, 26%, 27%, 28%, 29%, 30%, 31%, 32%, 33%, 34%, 35%, 36%, 37%, 38%, 39%, 40%, 41%, 42%, 43%, 44%, 45%, 46%, 47%, 48%, 49%, 50%, 51%, 52%, 53%, 54%, 55%, 56%, 57%, 58%, 59%, 60%, 61%, 62%, 63%, 64%, 65%, 66%, 67%, 68%, 69%, 70%, 71%, 72%, 73%, 74%, 75%, 76%, 77%, 78%, 79%, 80%, 81%, 82%, 83%, 84%, 85%, 86%, 87%, 88%, 89%, 90%, 91%, 92%, 93%, 94%, 95%, 96%, 97%, 98%, or 99% or more sequence identity with the amino acid sequence of the polypeptide encoded by the nucleic acid molecule of (a) to (c) and confers enhanced yield-related traits in plants relative to control plants;
f) nucleic acid molecule which hybridizes with a nucleic acid molecule of (a) to (c) under stringent hybridization conditions and confers enhanced yield-related traits in plants relative to control plants;
g) a nucleic acid molecule encoding a polypeptide which can be isolated with the aid of monoclonal or polyclonal antibodies made against a polypeptide encoded by one of the nucleic acid molecules of (a) to (e);
h) a nucleic acid molecule encoding a polypeptide comprising the consensus sequence or one or more polypeptide motifs as shown in Motif 1 (corresponding to SEQ ID NO: 6), Motif 2 (corresponding to SEQ ID NO: 7), Motif 3 (corresponding to SEQ ID NO: 8), Motif 4 (corresponding to SEQ ID NO: 9) or Motif 5 (corresponding to SEQ ID NO: 10);
i) nucleic acid molecule which comprises a polynucleotide, which is obtained by amplifying a cDNA library or a genomic library using the primers shown in SEQ ID NO: 46 (prm09481) and SEQ ID NO: 47 (prm09482) and
j) a nucleic acid molecule which is obtainable by screening a suitable nucleic acid library under stringent hybridization conditions with a probe comprising a complementary sequence of a nucleic acid molecule of (a) or (b) or with a fragment thereof, having at least 15 nt, preferably 20 nt, 30 nt, 50 nt, 100 nt, 200 nt or 500 nt of a nucleic acid molecule complementary to a nucleic acid molecule sequence characterized in (a) to (e).

[0373] Item 46: Polypeptide encoded by a nucleic acid molecule according to item 45.

[0374] Item 47: A method for increasing yield-related traits in plants relative to control plants, comprising increasing expression in the seeds of a plant, of a nucleic acid sequence encoding a tRNA delta(2)-isopentenylpyrophosphate transferase (IPPT) polypeptide, which IPPT polypeptide comprises (i) a tRNA isopentenyltransferase domain with an InterPro accession IPR002627; and (ii) an N-terminal ATP/GTP-binding site motif A (P-loop), and optionally selecting for plants having increased yield-related traits.

[0375] Item 48: Method according to Item 47, wherein said IPPT polypeptide has (i) in increasing order of preference at least 70%, 75%, 80%, 85%, 90%, 95%, 98%, 99% or more amino acid sequence identity to an N-terminal ATP/GTP-binding site motif A (P-loop) as represented by SEQ ID NO: 199; and has in increasing order of preference at least 70%, 75%, 80%, 85%, 90%, 95%, 98%, 99% or more amino acid sequence identity to one or more of: (ii) Conserved motif I DSR(Q/L)(V/L/I) as represented by SEQ ID NO: 200; or (ii) Conserved motif II (N/D/S/T)(I/V)GTAKP(T/S) as represented by SEQ ID NO: 201; or (iii) Conserved motif III L(V/A/I)GG(S/T)GLY as represented by SEQ ID NO:202; or (iv) Conserved motif IV F/Y/L)AK(R/K/Q)Q(R/K/M)TWFR as represented by SEQ ID NO: 203.

[0376] Item 49: Method according to Item 47 or 48, wherein said IPPT polypeptide has in increasing order of preference at least 35%, 40%, 45%, 50%, 55%, 60%, 65%, 70%, 75%, 80%, 85%, 90%, 95%, 98%, 99% or more amino acid sequence identity to the IPPT polypeptide as represented by SEQ ID NO: 144 or to any of the polypeptide sequences given in Table A herein.

[0377] Item 50: Method according to any preceding Item 47 to 49, wherein said IPPT polypeptide is capable of complementing a yeast mod5 mutant strain which lacks endogenous IPPT activity, or is capable of complementing an E. coli miaA mutant strain which lacks endogenous IPPT activity,

[0378] Item 51: Method according to any preceding Item 47 to 50, wherein said nucleic acid sequence encoding an IPPT polypeptide is represented by any one of the nucleic acid sequence SEQ ID NOs given in Table A or a portion thereof, or a sequence capable of hybridising with any one of the nucleic acid sequences SEQ ID NOs given in Table A.

[0379] Item 52: Method according to any preceding Item 47 to 51, wherein said nucleic acid sequence encodes an orthologue or paralogue of any of the polypeptide sequence SEQ ID NOs given in Table A.

[0380] Item 53: Method according to any preceding Item 47 to 52, wherein said increased expression is effected by any one or more of: T-DNA activation tagging, TILLING, or homologous recombination.

[0381] Item 54: Method according to any preceding Item 47 to 53, wherein said increased expression is effected by introducing and expressing in the seeds of a plant, a nucleic acid sequence encoding an IPPT polypeptide.

[0382] Item 55: Method according to any preceding Item 47 to 54, wherein said increased yield-related trait is one or more of: increased early vigour, increased aboveground biomass, increased total seed yield per plant, increased total number of seeds, increased number of filled seeds, increased number of flowers per panicles, and increased harvest index.

[0383] Item 56: Method according to any preceding Item 47 to 55, wherein said nucleic acid sequence is operably linked to a seed-specific promoter.

[0384] Item 57: Method according to Item 56, wherein said seed-specific promoter is a dehydrin promoter, preferably a rice dehydrin promoter, more preferably a dehydrin promoter as represented by SEQ ID NO: 204.

[0385] Item 58: Method according to Item 56, wherein said seed-specific promoter is a proteinase inhibitor promoter, preferably to a rice proteinase inhibitor promoter, more preferably a proteinase inhibitor promoter as represented by SEQ ID NO: 205.

[0386] Item 59: Method according to any preceding Item 47 to 58 wherein said nucleic acid sequence encoding an IPPT polypeptide is from the Procaryota domain, preferably from Cyanobacteria, further preferably from Chroococcales, more preferably from Synechococcus species, most preferably from Synechococcus PCC 7942.

[0387] Item 60: Plants, parts thereof (including seeds), or plant cells obtainable by a method according to any preceding Item 47 to 59, wherein said plant, part or cell thereof comprises an isolated nucleic acid transgene encoding an IPPT polypeptide, operably linked to a seed-specific promoter.

[0388] Item 61: Construct comprising:

(a) a nucleic acid sequence encoding an IPPT polypeptide as defined in any one of Items 47 to 52;
(b) one or more control sequences capable of driving expression of the nucleic acid sequence of (a); and optionally
(c) a transcription termination sequence.

[0389] Item 62: Construct according to Item 61, wherein said control sequence is a seed-specific promoter.

[0390] Item 63: Construct according to Item 62, wherein said seed-specific promoter is a dehydrin promoter, preferably a rice dehydrin promoter, more preferably a dehydrin promoter as represented by SEQ ID NO: 204.

[0391] Item 64: Construct according to Item 62, wherein said seed-specific promoter is a proteinase inhibitor promoter, preferably to a rice proteinase inhibitor promoter, more preferably a proteinase inhibitor promoter as represented by SEQ ID NO: 205.

[0392] Item 65: Use of a construct according to any one of Items 61 to 64, in a method for making plants having increased yield-related traits relative to control plants, which increased yield-related traits are one or more of: increased early vigour, increased aboveground biomass, increased total seed yield per plant, increased total number of seeds, increased number of filled seeds, increased number of flowers per panicles, and increased harvest index.

[0393] Item 66: Plant, plant part or plant cell transformed with a construct according to any one of Items 61 to 64.

[0394] Item 67: Method for the production of transgenic plants having increased yield-related traits relative to control plants, comprising:

(i) introducing and expressing in a plant, plant part, or plant cell, a nucleic acid sequence encoding an IPPT polypeptide as defined in any one of Items 47 to 52, under the control of a seed-specific promoter; and
(ii) cultivating the plant cell, plant part, or plant under conditions promoting plant growth and development.

[0395] Item 68: Transgenic plant having increased yield-related traits relative to control plants, resulting from increased expression in the seeds, of a nucleic acid sequence encoding an IPPT polypeptide as defined in any one of Items 47 to 52, operably linked to a seed-specific promoter, or a transgenic plant cell or transgenic plant part derived from said transgenic plant.

[0396] Item 69: Transgenic plant according to Item 60, 66 or 68, wherein said plant is a crop plant or a monocot or a cereal, such as rice, maize, wheat, barley, millet, rye, triticale, sorghum and oats, or a transgenic plant cell derived from said transgenic plant.

[0397] Item 70: Harvestable parts comprising an isolated nucleic acid sequence encoding an IPPT polypeptide of a plant according to Item 69, wherein said harvestable parts are preferably seeds.

[0398] Item 71: Products derived from a plant according to Item 69 and/or from harvestable parts of a plant according to Item 70.

[0399] Item 72: Use of a nucleic acid sequence encoding an IPPT polypeptide as defined in any one of Items 45 to 50 in increasing yield-related traits, comprising one or more of increased early vigour, increased aboveground biomass, increased total seed yield per plant, increased total number of seeds, increased number of filled seeds, increased number of flowers per panicles, and increased harvest index.

[0400] Item 73: A method for enhancing yield related traits in plants relative to control plants, comprising modulating expression of a nucleic acid encoding an SHR polypeptide in plants grown under conditions of sub-optimal nutrient availability.

[0401] Item 74: A method for increasing Thousand Kernel Weight (TKW) in plants relative to control plants, comprising modulating expression of a nucleic acid encoding an SHR polypeptide in plants grown under non-nutrient limiting conditions.

[0402] Item 75: Method according to Item 73 or 74, wherein said SHR polypeptide comprises any full length polypeptide which when used in the construction of a GRAS phylogenetic tree, such as the one depicted in FIG. 2, clusters with the group of SHR polypeptides comprising the amino acid sequence represented by SEQ ID NO: 209 rather than with any other group.

[0403] Item 76: Method according to Item 73 or 75, wherein said conditions of sub-optimal nutrient availability are reduced nitrogen availability relative to control plants.

[0404] Item 77: Method according to any preceding Item 73 to 76, wherein said modulated expression is effected by introducing and expressing in a plant a nucleic acid encoding an SHR polypeptide.

[0405] Item 78: Method according to any preceding Item 73 to 77, wherein said nucleic acid encoding an SHR polypeptide encodes any one of the proteins listed in Table A or is a portion of such a nucleic acid, or a nucleic acid capable of hybridising with such a nucleic acid.

[0406] Item 79: Method according to any preceding Item 73 to 78, wherein said nucleic acid sequence encodes an orthologue or paralogue of any of the proteins given in Table A.

[0407] Item 80: Method according to any one of Items 73 or 75 to 79, wherein said enhanced yield-related traits comprise increased yield, preferably increased biomass and/or increased seed yield relative to control plants.

[0408] Item 81: Method according to any one of Items 77 to 80, wherein said nucleic acid is operably linked to a constitutive promoter, preferably to a GOS2 promoter, most preferably to a GOS2 promoter from rice.

[0409] Item 82: Method according to any preceding Item 73 to 81, wherein said nucleic acid encoding an SHR polypeptide is of plant origin, preferably from a dicotyledonous plant, further preferably from the family Brassicaceae, more preferably from the genus Arabidopsis, most preferably from Arabidopsis thaliana.

[0410] Item 83: Plant or part thereof, including seeds, obtainable by a method according to any preceding Item 73 to 82, wherein said plant or part thereof comprises a recombinant nucleic acid encoding an SHR polypeptide.

[0411] Item 84: Construct comprising:

(i) nucleic acid encoding an SHR polypeptide as defined in Item 75;
(ii) one or more control sequences capable of driving expression of the nucleic acid sequence of (a); and optionally
(iii) a transcription termination sequence.

[0412] Item 85: Construct according to Item 84, wherein one of said control sequences is a constitutive promoter, preferably a GOS2 promoter, most preferably a GOS2 promoter from rice.

[0413] Item 86: Use of a construct according to Item 84 or 85 in a method for making plants having increased yield, particularly increased biomass and/or increased seed yield relative to control plants.

[0414] Item 87: Use of a construct according to Item 84 or 85 in a method for making plants having increased TKW.

[0415] Item 88: Plant, plant part or plant cell transformed with a construct according to Item 84 or 85.

[0416] Item 89: Method for the production of a transgenic plant having enhanced yield-related traits relative to control plants, comprising:

(i) introducing and expressing in a plant a nucleic acid encoding an SHR as defined in Item 75; and
(ii) cultivating the plant cell under conditions of reduced nutrient availability.

[0417] Item 90: Method for the production of a transgenic plant having increased TKW relative to control plants, comprising:

(i) introducing and expressing in a plant a nucleic acid encoding an SHR as defined in Item 75; and
(ii) cultivating the plant cell under non-nutrient limiting conditions.

[0418] Item 91: Products derived from a plant according to Item 83 or 88 and/or from harvestable parts of a plant according to Item 83 or 88.

[0419] Item 92: Use of a nucleic acid encoding an SHR polypeptide in enhancing yield-related traits, particularly in increasing seed yield and/or shoot biomass in plants, relative to control plants.

[0420] Item 93: Use of a nucleic acid encoding an SHR polypeptide in increasing TKW in plants, relative to control plants.

### EXAMPLES

[0421] The present invention will now be described with reference to the following examples, which are by way of illustration alone. The following examples are not intended to completely define or otherwise limit the scope of the invention.

[0422] DNA manipulation: unless otherwise stated, recombinant DNA techniques are performed according to standard protocols described in (Sambrook (2001) Molecular Cloning: a laboratory manual, 3rd Edition Cold Spring Harbor Laboratory Press, CSH, New York) or in Volumes 1 and 2 of Ausubel et al. (1994), Current Protocols in Molecular Biology, Current Protocols. Standard materials and methods for plant molecular work are described in Plant Molecular Biology Labfax (1993) by R. D. D. Croy, published by BIOS Scientific Publications Ltd (UK) and Blackwell Scientific Publications (UK).

### Example 1

### Identification of Sequences Related to the Nucleic Acid Sequence Used in the Methods of the Invention

[0423] Sequences (full length cDNA, ESTs or genomic) related to the nucleic acid sequence used in the methods of the present invention were identified amongst those maintained in the Entrez Nucleotides database at the National Center for Biotechnology Information (NCBI) using database sequence search tools, such as the Basic Local Alignment Tool (BLAST) (Altschul et al. (1990) J. Mol. Biol. 215:403-410; and Altschul et al. (1997) Nucleic Acids Res. 25:3389-3402). The program is used to find regions of local similarity between sequences by comparing nucleic acid or polypeptide sequences to sequence databases and by calculating the statistical significance of matches. For example, the polypeptide encoded by the nucleic acid used in the present invention was used for the TBLASTN algorithm, with default settings and the filter to ignore low complexity sequences set off. The output of the analysis was viewed by pairwise comparison, and ranked according to the probability score (E-value), where the score reflect the probability that a particular alignment occurs by chance (the lower the E-value, the more significant the hit). In addition to E-values, comparisons were also scored by percentage identity. Percentage identity refers to the number of identical nucleotides (or amino acids) between the two compared nucleic acid (or polypeptide) sequences over a particular length. In some instances, the default parameters may be adjusted to modify the stringency of the search. For example the E-value may be increased to show less stringent matches. This way, short nearly exact matches may be identified.

[0424] List A1 provides nucleic acid sequences related to SEQ ID NO: 1, and List A2 provides nucleic acid sequences related to SEQ ID NO: 3.

[0425] The expression “List A1” as used herein are equivalent and interexchangeable with “Table A1”.

[0426] The expression “List A2” as used herein are equivalent and interexchangeable with “Table A2”.

[0427] The term “table A” used in this specification is to be taken to specify the content of table A1, table A2, table A3, table A4, and/or table A5.

[0428] The term “table A1” used in this specification is to be taken to specify the content of table A1.

[0429] The term “table A2” used in this specification is to be taken to specify the content of table A2.

[0430] The term “table A3” used in this specification is to be taken to specify the content of table A3.

[0431] The term “table A4” used in this specification is to be taken to specify the content of table A4.

[0432] The term “table A5” used in this specification is to be taken to specify the content of table A5.

[0433] In one preferred embodiment, the term “table A” means table A1. In another preferred embodiment, the term “table A” means table A2. In another preferred embodiment, the term “table A” means table A3. In another preferred embodiment, the term “table A” means table A4. In another preferred embodiment, the term “table A” means table A5.

[0434] The term “table B” used in this specification is to be taken to specify the content of table B1, table B2, table B3, and/or table B4.

[0435] The term “table B1” used in this specification is to be taken to specify the content of table B1.

[0436] The term “table B2” used in this specification is to be taken to specify the content of table B2.

[0437] The term “table B3” used in this specification is to be taken to specify the content of table B3.

[0438] The term “table B4” used in this specification is to be taken to specify the content of table B4.

[0439] In one preferred embodiment, the term “table B” means table B1. In another preferred embodiment, the term “table B” means table B2. In another preferred embodiment, the term “table B” means table B3. In another preferred embodiment, the term “table B” means table B4.

TABLE A1
Sequences related to SEQ ID NO: 1

| | | Nucleic | Protein |
|---|---|---|---|
| | | acid SEQ | SEQ |
| Name | Plant Source | ID NO: | ID NO: |
| Ms_TCP_sugar | Medicago sativa | 1 | 2 |
| AtTCP7 | Arabidopsis thaliana | 7 | 8 |
| OsTCP4 | Oryza sativa | 9 | 10 |
| OsTCP10 | Oryza sativa | 11 | 12 |
| Pt\TCP | Populus trichocarpa | 13 | 14 |
| Sl\TCP | Solanum lycopersicum | 15 | 16 |
| Vv\CAO70167 | Vitis vinifera | 17 | 18 |

TABLE A2
Sequences related to SEQ ID NO: 3

| | | Nucleic | Protein |
|---|---|---|---|
| | | acid SEQ | SEQ |
| Name | Plant Source | ID NO: | ID NO: |
| Mt_TCP2_sugar | Medicago truncatula | 3 | 4 |
| Am\TCP\CAE45599 | Antirrhinum majus | 19 | 20 |
| AT3G47620 | Arabidopsis thaliana | 21 | 22 |
| AtTCP15 | Arabidopsis thaliana | 23 | 24 |
| Gh\TCP\AAD48836 | Gossipum hirsutum | 25 | 26 |
| OSTCP12 | Oryza sativa | 27 | 28 |
| OsTCP5 | Oryza sativa | 29 | 30 |
| Pt\TCP\scaff_124.66\ | Populus trichocarpa | 31 | 32 |
| [1298]\f\[31-1218] | | | |
| Sd\TCP\AAT38718 | Solanum demissum | 33 | 34 |
| Vv\TCP\AAD48836 | Vitis vinifera | 35 | 36 |
| Vv\TCP\CAO62540 | Vitis vinifera | 37 | 38 |

[0440] Concerning Epsin-like sequences, table A3 provides a list of nucleic acid sequences related to the nucleic acid sequence used in the methods of the present invention.

TABLE A3
Examples of Epsin-like polypeptides:

| | Nucleic acid | Protein |
|---|---|---|
| Plant Source | SEQ ID NO: | SEQ ID NO: |
| Arabidopsis thaliana | 43 | 44 |
| Arabidopsis thaliana | 65 | 66 |
| Vitis vinifera | 67 | 68 |
| Oryza sativa | 69 | 70 |
| Oryza sativa | 71 | 72 |
| Avena fatua | 73 | 74 |
| Medicago truncatula | 75 | 76 |
| Arabidopsis thaliana | 77 | 78 |
| Arabidopsis thaliana | 79 | 80 |
| Arabidopsis thaliana | 81 | 82 |
| Arabidopsis thaliana | 83 | 84 |
| Oryza sativa | 85 | 86 |
| Arabidopsis thaliana | 87 | 88 |
| Vitis vinifera | 89 | 90 |
| Arabidopsis thaliana | 91 | 92 |
| Arabidopsis thaliana | 93 | 94 |
| Vitis vinifera | 95 | 96 |
| Chlamydomonas reinhardtii | 97 | 98 |
| Ostreococcus lucimarinus | 99 | 100 |
| Oryza sativa | 101 | 102 |
| Oryza sativa | | 103 |
| Oryza sativa | | 104 |
| Oryza sativa | 105 | 106 |
| Oryza sativa | | 107 |
| Oryza sativa | 108 | 109 |
| Oryza sativa | | 110 |
| Brassica napus | 111 | 112 |
| Glycine max | 113 | 114 |
| Hordeum vulgare | 115 | 116 |
| Medicago truncatula | 117 | 118 |
| Medicago truncatula | 119 | 120 |
| Physcomitrella patents | 121 | 122 |
| Physcomitrella patents | 123 | 124 |
| Physcomitrella patents | 125 | 126 |
| Populus trichocarpa | 127 | 128 |
| Populus trichocarpa | 129 | 130 |
| Populus trichocarpa | 131 | 132 |
| Solanum lycopersicum | 133 | 134 |
| Triticum aestivum | 135 | 136 |
| Triticum aestivum | 137 | 138 |
| Arabidopsis thaliana | 139 | 140 |
| Zea mays | 141 | 142 |

[0441] In some instances, related sequences have tentatively been assembled and publicly disclosed by research institutions, such as The Institute for Genomic Research (TIGR). The Eukaryotic Gene Orthologs (EGO) database may be used to identify such related sequences, either by keyword search or by using the BLAST algorithm with the nucleic acid or polypeptide sequence of interest.

[0442] Concerning IPPT, table A4 provides a list of nucleic acid sequences related to the nucleic acid sequence used in the methods of the present invention.

TABLE A4
Examples of IPPT polypeptide sequences, and encoding nucleic acid sequences:

| | | | Nucleic acid | Polypeptide |
|---|---|---|---|---|
| | | Public database | sequence | sequence |
| Name | Source organism | accession number | SEQ ID NO: | SEQ ID NO: |
| Synec_IPPT | Synechococcus sp. PCC 7942 | U30252.3 | 143 | 144 |
| Acama_IPPT (miaA) | Acaryochloris marina MBIC11017 | CP000828 | 145 | 146 |
| Anava_IPPT | Anabaena variabilis ATCC 29413 | CP000117 | 147 | 148 |
| Glovi_IPPT | Gloeobacter violaceus PCC 7421 | BA000045 | 149 | 150 |
| Micae_IPPT | Microcystis aeruginosa PCC | AM778958 | 151 | 152 |
| | 7806 | | | |
| Nossp_IPPT | Nostoc sp. PCC 7120 DNA | BA000019 | 153 | 154 |
| Proma1375_IPPT | Prochlorococcus marinus subsp. | AE017126 | 155 | 156 |
| | marinus str. CCMP1375 | | | |
| Proma9211_IPPT | Prochlorococcus marinus str. MIT | CP000878 | 157 | 158 |
| | 9211 | | | |
| Proma9215_IPPT | Prochlorococcus marinus str. MIT | CP000825 | 159 | 160 |
| | 9215 | | | |
| Proma9301_IPPT | Prochlorococcus marinus str. MIT | CP000576 | 161 | 162 |
| | 9301 | | | |
| Proma9303_IPPT | Prochlorococcus marinus str. MIT | CP000554 | 163 | 164 |
| | 9303 | | | |
| Proma9312_IPPT | Prochlorococcus marinus str. MIT | CP000111 | 165 | 166 |
| | 9312 | | | |
| Proma9313_IPPT | Prochlorococcus marinus | BX572095 | 167 | 168 |
| | MIT9313 | | | |
| Proma9515_IPPT | Prochlorococcus marinus str. MIT | CP000552 | 169 | 170 |
| | 9515 | | | |
| Proma9601_IPPT | Prochlorococcus marinus str. | CP000551 | 171 | 172 |
| | AS9601 | | | |
| PromaMED4_IPPT | Prochlorococcus marinus MED4 | BX548174 | 173 | 174 |
| PromaNATL1A_IPPT | Prochlorococcus marinus str. | CP000553 | 175 | 176 |
| | NATL1A | | | |
| PromaNATL2A_IPPT | Prochlorococcus marinus str. | CP000095 | 177 | 178 |
| | NATL2A | | | |
| SynecJA-3_IPPT | Synechococcus sp. JA-3-3Ab | CP000239 | 179 | 180 |
| Synec307_IPPT | Synechococcus sp. RCC307 | CT978603 | 181 | 182 |
| Synec6803_IPPT | Synechocystis sp. PCC 6803 | BA000022 | 183 | 184 |
| | DNA | | | |
| Synec7803_IPPT | Synechococcus WH7803 | CT971583 | 185 | 186 |
| Synec8102_IPPT | Synechococcus sp. WH8102 | BX569689.1 | 187 | 188 |
| Synec9311_IPPT | Synechococcus sp. CC9311 | CP000435 | 189 | 190 |
| Synec9605_IPPT | Synechococcus sp. CC9605 | CP000110 | 191 | 192 |
| Synec9902_IPPT | Synechococcus sp. CC9902 | CP000097 | 193 | 194 |
| Theel_IPPT | Thermosynechococcus elongatus | BA000039 | 195 | 196 |
| | BP-1 | | | |
| Trier_IPPT | Trichodesmium erythraeum | CP000393 | 197 | 198 |
| | IMS101 | | | |

[0443] In some instances, related sequences have tentatively been assembled and publicly disclosed by research institutions, such as The Institute for Genomic Research (TIGR). The Eukaryotic Gene Orthologs (EGO) database may be used to identify such related sequences, either by keyword search or by using the BLAST algorithm with the nucleic acid sequence or polypeptide sequence of interest. On other instances, special nucleic acid sequence databases have been created for particular organisms, such as by the Joint Genome Institute.

[0444] Concerning SHR, table A5 provides a list of nucleic acid sequences related to the nucleic acid sequence used in the methods of the present invention.

TABLE A5
Examples of SHR polypeptides

| | Species of | Nucleic acid | Polypeptide |
|---|---|---|---|
| Name | origin | SEQ ID NO: | SEQ ID NO: |
| | Arabidopsis | 208 | 209 |
| | thaliana | | |
| At4g37650 | Arabidopsis | 210 | 211 |
| | thaliana | | |
| TA13018_3352 | Pinus taeda | 212 | 213 |
| 22633_part | Physcomitrella | 214 | 215 |
| | patents | | |
| 14911_part | Physcomitrella | 216 | 217 |
| | patents | | |
| Os03g31880 | Oryza sativa | 218 | 219 |
| Os07g39820 | Oryza sativa | 220 | 221 |
| US200510879.113 | Zea mays | 222 | 223 |
| TA7750_4236 | Lactuca sativa | 224 | 225 |
| AC147000 | Medicago | 226 | 227 |
| | truncatula | | |
| TC153082 | Solanum | 228 | 229 |
| | tuberosum | | |
| WO2005001020_215 | Eucalyptus | 230 | 231 |
| | grandis | | |
| AM431974 | Vitis vinifera | 232 | 233 |
| scaff_186.17 | Populus | 234 | 235 |
| | trichocarpa | | |
| TA2955_3988 | Ricinus | 236 | 237 |
| | communis | | |
| US2004031072.68433 | Glycine max | 238 | 239 |
| CT027662 | Medicago | 240 | 241 |
| | truncatula | | |

### Example 2

### Alignment of TCP Polypeptide Sequences

[0445] Alignment of polypeptide sequences was performed using the AlignX programme from the Vector NTI (Invitrogen) which is based on the popular Clustal W algorithm of progressive alignment (Thompson et al. (1997) Nucleic Acids Res 25:4876-4882; Chenna et al. (2003). Nucleic Acids Res 31:3497-3500). Default values are for the gap open penalty of 10, for the gap extension penalty of 0,1 and the selected weight matrix is Blosum 62 (if polypeptides are aligned). Minor manual editing was done to further optimise the alignment. The TCP1 polypeptides are aligned in FIG. 1 and the TCP2 polypeptides in FIG. 2.

[0446] A phylogenetic tree of TCP polypeptides (FIGS. 1 and 2) was constructed using a neighbour-joining clustering algorithm as provided in the AlignX programme from the Vector NTI (Invitrogen).

[0447] Concerning Epsin-like sequences, default values are for the gap open penalty of 10, for the gap extension penalty of 0,1 and the selected weight matrix is Gonnet (if polypeptides are aligned). Minor manual editing may be done to further optimise the alignment. Sequence conservation among Epsin-like polypeptides is essentially in the N-terminal ENTH domain of the polypeptides and in the C-terminal part, the central part usually being more variable in sequence length and composition. The Epsin-like polypeptides are aligned in FIG. 2.

[0448] Multiple sequence alignment of all the IPPT polypeptide sequences in Table A4 was performed using the AlignX algorithm (from Vector NTI 10.3, Invitrogen Corporation). Results of the alignment are shown in FIG. 3 of the present application. The N-terminal ATP/GTP-binding site motif A (P-loop) as represented by SEQ ID NO: 199, the Conserved motif I DSR(Q/L)(V/L/I) as represented by SEQ ID NO: 200, the Conserved motif II (N/D/S/T)(I/V)GTAKP(T/S) as represented by SEQ ID NO: 201, the Conserved motif III L(V/A/I)GG(S/T)GLY as represented by SEQ ID NO: 202, and the Conserved motif IV F/Y/L)AK(R/K/Q)Q(R/K/M)TWFR, are boxed. The putative zinc finger motif C2H2 (C-X2-C-X(12,18)-H-X5-H found in eukaryotic tRNA-IPTs is marked with a bracket, and the conserved Cys and His residues therein are boxed.

[0449] Concerning SHR, alignment of polypeptide sequences was performed using the AlignX programme from the Vector NTI (Invitrogen) which is based on the popular Clustal W algorithm of progressive alignment (Thompson et al. (1997) Nucleic Acids Res 25:4876-4882; Chenna et al. (2003). Nucleic Acids Res 31:3497-3500). Default values are for the gap open penalty of 10, for the gap extension penalty of 0,1 and the selected weight matrix is Blosum 62 (if polypeptides are aligned). Minor manual editing was done to further optimise the alignment.

[0450] Regarding SHR-sequences, a phylogenetic tree of GRAS polypeptides (FIG. 14) was constructed. A neighbour-joining tree of GRAS and SHR proteins was constructed using GRAS proteins from rice, Arabidopsis and SHR-related proteins from the various organisms, were aligned using MUSCLE. A neighbour-joining tree was produced with CLUSTALX. Bootstrap analysis was performed for 100 iterations. The bootstrap support is shown only for the main nodes. The SHR related proteins are indicated. A. thaliana: Arabidopsis thaliana; E. grandis: Eucalyptus grandis; G. max: Glycine max; L. sativa: Latuca sativa; M trucatula: Medicago truncatula; O. sativa: Oryza sativa; P. taeda: Pinus taeda; P. patens: Physcomitrella patens; P. trichocarpa: Populus trichocarpa; R. communis: Ricinus communis; S. tuberosum: Solanum tuberosum; V. vinifera: Vitis vinifera; Z. mays: Zea mays; —part: partial sequence.

### Example 3

### Calculation of Global Percentage Identity Between Polypeptide Sequences Useful in Performing the Methods of the Invention

[0451] Concerning TCP1 or TCP2, global percentages of similarity and identity between full length polypeptide sequences useful in performing the methods of the invention were determined using one of the methods available in the art, the MatGAT (Matrix Global Alignment Tool) software (BMC Bioinformatics. 2003 4:29. MatGAT: an application that generates similarity/identity matrices using protein or DNA sequences. Campanella J J, Bitincka L, Smalley J; software hosted by Ledion Bitincka). MatGAT software generates similarity/identity matrices for DNA or protein sequences without needing pre-alignment of the data. The program performs a series of pair-wise alignments using the Myers and Miller global alignment algorithm (with a gap opening penalty of 12, and a gap extension penalty of 2), calculates similarity and identity using for example Blosum 62 (for polypeptides), and then places the results in a distance matrix. Sequence similarity is shown in the bottom half of the dividing line and sequence identity is shown in the top half of the diagonal dividing line.

[0452] Parameters used in the comparison were:

| Scoring matrix: | Blosum62 |
|---|---|
| First Gap: | 12 |
| Extending gap: | 2 |

[0453] Results of the software analysis are shown in Table B for the global similarity and identity over the full length of the polypeptide sequences. Percentage identity is given below the diagonal in bold and percentage similarity is given above the diagonal (normal face).

TABLE B
MatGAT results for global similarity and identity over the full length of the polypeptide sequences.
Ms_TCP_SUGAR family (TCP1)

| | 1 | 2 | 3 | 4 | 5 | 6 | 7 |
|---|---|---|---|---|---|---|---|
| 1. SI\TCP | | 46.4 | 45.1 | 40.7 | 47.2 | 29.9 | 33.3 |
| 2. pt\TCP | 55.4 | | 55.6 | 49.8 | 58.3 | 37.3 | 40.3 |
| 3. Vv\CAO70167 | 63.2 | 62.8 | | 55.9 | 53.1 | 46.8 | 46.2 |
| 4. Ms_TCP_SUGAR | 55.6 | 64.3 | 65.0 | | 55.1 | 38.4 | 39.0 |
| 5. AtTCP7 | 57.6 | 66.9 | 61.6 | 70.0 | | 37.2 | 39.1 |
| 6. OsTCP10 | 47.1 | 49.4 | 60.7 | 50.4 | 50.8 | | 62.0 |
| 7. OsTCP4 | 50.2 | 50.6 | 59.2 | 53.0 | 53.2 | 73.5 | |

Mt_TCP2_SUGAR family (TCP2)

| | 1 | 2 | 3 | 4 | 5 | 6 | 7 | 8 | 9 | 10 | 11 | 12 |
|---|---|---|---|---|---|---|---|---|---|---|---|---|
| 1. Am\TCPCAE45599 | | 61.5 | 46.4 | 46.4 | 48.5 | 48.5 | 43.3 | 40.9 | 44.1 | 45.2 | 47.9 | 48.2 |
| 2. Vv\TCP\CAO62540 | 73.9 | | 46.4 | 46.4 | 62.2 | 50.7 | 40.6 | 47.4 | 47.5 | 47.0 | 53.6 | 54.3 |
| 3. Sd\TCPAAT38718 | 56.8 | 59.1 | | 100.0 | 39.9 | 34.9 | 35.9 | 35.7 | 35.9 | 34.4 | 63.2 | 64.5 |
| 4. Gh\TCP\AAD48836 | 56.8 | 59.1 | 100.0 | | 39.9 | 34.9 | 35.9 | 35.7 | 35.9 | 34.4 | 63.2 | 64.5 |
| 5. Vv\TCP\CAO48409 | 59.3 | 74.4 | 58.0 | 58.0 | | 48.9 | 38.3 | 49.8 | 47.5 | 44.7 | 43.1 | 44.5 |
| 6. Mt_TCP2_SUGAR | 63.9 | 65.4 | 46.9 | 46.9 | 60.1 | | 37.0 | 40.4 | 44.3 | 43.8 | 35.8 | 36.6 |
| 7. AtTCP14 | 54.6 | 53.4 | 45.6 | 45.6 | 46.2 | 52.4 | | 33.5 | 38.0 | 39.9 | 35.5 | 36.6 |
| 8. AtTCP15 | 57.3 | 61.6 | 56.0 | 56.0 | 64.0 | 55.5 | 45.4 | | 43.0 | 39.6 | 36.1 | 38.5 |
| 9. OsTCP12 | 59.0 | 60.5 | 49.6 | 49.6 | 58.4 | 57.5 | 48.9 | 51.9 | | 67.0 | 34.6 | 37.0 |
| 10. OsTCP5 | 60.0 | 60.2 | 46.3 | 46.3 | 54.4 | 62.5 | 50.5 | 50.0 | 75.6 | | 34.8 | 36.4 |
| 11. Pt197953_gw1.IV.3042.1 | 57.0 | 63.8 | 74.5 | 74.5 | 62.3 | 49.0 | 43.8 | 54.2 | 47.3 | 46.3 | | 88.4 |
| 12. Pt266526_gw1.124.176.1 | 58.3 | 63.8 | 75.2 | 75.2 | 61.6 | 48.8 | 44.6 | 54.5 | 47.8 | 45.9 | 93.2 | |

[0454] A MATGAT table for local alignment of a specific domain, or data on % identity/similarity between specific domains may also be constructed.

[0455] Concerning Epsin-like sequences, global percentages of similarity and identity between full length polypeptide sequences useful in performing the methods of the invention were determined using one of the methods available in the art, the MatGAT (Matrix Global Alignment Tool) software (BMC Bioinformatics. 2003 4:29. MatGAT: an application that generates similarity/identity matrices using protein or DNA sequences. Campanella J J, Bitincka L, Smalley J; software hosted by Ledion Bitincka). MatGAT software generates similarity/identity matrices for DNA or protein sequences without needing pre-alignment of the data. The program performs a series of pair-wise alignments using the Myers and Miller global alignment algorithm (with a gap opening penalty of 12, and a gap extension penalty of 2), calculates similarity and identity using for example Blosum 62 (for polypeptides), and then places the results in a distance matrix. Sequence similarity is shown in the bottom half of the dividing line and sequence identity is shown in the top half of the diagonal dividing line.

[0456] Concerning Epsin-like sequences, parameters used in the comparison were:

| Scoring matrix: | Blosum62 |
|---|---|
| First Gap: | 12 |
| Extending gap: | 2 |

[0457] Results of the software analysis are shown in Table B3 for the global similarity and identity over the full length of the polypeptide sequences. Percentage identity is given above the diagonal in bold and percentage similarity is given below the diagonal (normal face).

[0458] The percentage identity between the Epsin-like polypeptide sequences useful in performing the methods of the invention can be as low as 14% amino acid identity compared to SEQ ID NO: 44.

TABLE B3
MatGAT results for global similarity and identity over the full length of the polypeptide sequences.

| | 1 | 2 | 3 | 4 | 5 | 6 | 7 | 8 | 9 | 10 | 11 | 12 |
|---|---|---|---|---|---|---|---|---|---|---|---|---|
| 1. SEQID2 | | 96.4 | 59.5 | 46.1 | 41.0 | 40.9 | 39.5 | 37.9 | 43.0 | 25.0 | 25.4 | 25.4 |
| 2. CAB87689 | 96.5 | | 58.2 | 45.1 | 39.9 | 40.1 | 38.4 | 37.2 | 42.0 | 25.7 | 25.5 | 25.5 |
| 3. CAO43767 | 73.4 | 71.6 | | 46.7 | 42.0 | 41.5 | 40.9 | 39.4 | 43.8 | 25.4 | 27.8 | 27.8 |
| 4. CAD41810 | 61.3 | 61.3 | 61.8 | | 44.3 | 67.3 | 42.4 | 40.2 | 95.8 | 26.6 | 25.7 | 25.7 |
| 5. BAD87030 | 58.8 | 59.2 | 58.6 | 58.9 | | 40.8 | 88.0 | 82.2 | 42.8 | 24.8 | 25.0 | 25.0 |
| 6. AAB68030 | 56.1 | 56.1 | 55.3 | 76.0 | 57.5 | | 40.5 | 39.3 | 64.3 | 26.8 | 26.9 | 26.9 |
| 7. EAZ13473 | 57.5 | 56.3 | 58.3 | 58.1 | 91.2 | 56.4 | | 91.1 | 40.8 | 23.9 | 23.8 | 23.8 |
| 8. EAY75756 | 54.2 | 53.7 | 55.7 | 58.1 | 89.2 | 55.3 | 93.5 | | 38.6 | 23.2 | 24.3 | 24.0 |
| 9. EAY95411 | 58.5 | 58.5 | 59.4 | 96.3 | 56.5 | 73.2 | 55.6 | 55.7 | | 25.2 | 24.2 | 24.2 |
| 10. ABN08674 | 36.8 | 36.6 | 37.2 | 35.8 | 37.8 | 38.1 | 36.4 | 35.8 | 34.4 | | 50.0 | 50.1 |
| 11. BAF01674 | 39.1 | 38.4 | 40.7 | 38.1 | 38.9 | 38.5 | 37.3 | 38.0 | 36.6 | 62.7 | | 99.9 |
| 12. NP_850387 | 39.1 | 38.4 | 40.7 | 38.1 | 38.9 | 38.4 | 37.3 | 37.7 | 36.6 | 62.7 | 100.0 | |
| 13. BAD44158 | 42.3 | 43.7 | 45.8 | 43.5 | 47.2 | 43.8 | 46.9 | 44.4 | 41.5 | 45.9 | 72.2 | 72.2 |
| 14. AAN72258 | 39.6 | 38.9 | 40.7 | 38.3 | 38.8 | 38.4 | 37.2 | 37.5 | 36.9 | 62.5 | 99.8 | 99.8 |
| 15. BAD19387 | 36.7 | 36.3 | 37.1 | 36.7 | 37.5 | 37.6 | 36.6 | 36.5 | 35.2 | 58.3 | 58.3 | 58.3 |
| 16. EAZ25008 | 36.7 | 36.3 | 37.1 | 36.7 | 37.5 | 37.6 | 36.6 | 36.5 | 35.2 | 58.3 | 58.3 | 58.3 |
| 17. CAB91599 | 33.3 | 33.6 | 34.6 | 34.6 | 34.5 | 35.2 | 34.5 | 34.1 | 33.5 | 59.2 | 70.5 | 70.5 |
| 18. CAO45312 | 37.4 | 38.2 | 39.1 | 38.3 | 39.7 | 40.5 | 38.6 | 38.9 | 36.8 | 58.3 | 63.6 | 63.6 |
| 19. AAL24360 | 33.5 | 33.6 | 34.9 | 34.8 | 34.5 | 35.2 | 34.5 | 34.0 | 33.7 | 59.1 | 70.4 | 70.4 |
| 20. AAC64305 | 34.1 | 33.4 | 35.3 | 31.6 | 30.7 | 28.2 | 31.7 | 30.7 | 29.5 | 24.9 | 29.5 | 29.5 |
| 21. CAN66991 | 33.8 | 34.0 | 36.7 | 35.9 | 35.6 | 35.4 | 33.8 | 34.8 | 35.0 | 56.3 | 58.7 | 58.7 |
| 22. XP001701452 | 38.9 | 39.7 | 38.1 | 36.9 | 37.1 | 35.4 | 38.9 | 38.7 | 35.2 | 29.4 | 29.1 | 29.1 |
| 23. XP001419857 | 20.5 | 20.3 | 20.5 | 18.7 | 18.5 | 18.2 | 19.3 | 18.8 | 17.5 | 12.4 | 13.5 | 13.5 |

| | 13 | 14 | 15 | 16 | 17 | 18 | 19 | 20 | 21 | 22 | 23 |
|---|---|---|---|---|---|---|---|---|---|---|---|
| 1. SEQID2 | 30.7 | 25.9 | 25.2 | 25.3 | 22.7 | 27.0 | 22.7 | 23.9 | 22.6 | 23.2 | 14.3 |
| 2. CAB87689 | 30.9 | 26.0 | 24.5 | 24.6 | 22.9 | 27.0 | 22.9 | 23.6 | 22.1 | 23.8 | 14.0 |
| 3. CAO43767 | 31.1 | 27.8 | 25.5 | 25.5 | 24.1 | 27.0 | 24.2 | 25.5 | 22.8 | 24.0 | 13.9 |
| 4. CAD41810 | 28.8 | 25.6 | 24.9 | 25.1 | 23.8 | 25.8 | 23.9 | 22.7 | 22.2 | 22.1 | 13.1 |
| 5. BAD87030 | 27.5 | 25.0 | 25.1 | 25.1 | 22.5 | 25.7 | 22.6 | 21.2 | 21.5 | 23.1 | 12.9 |
| 6. AAB68030 | 29.3 | 26.9 | 25.5 | 25.5 | 24.1 | 26.3 | 24.2 | 20.7 | 23.3 | 22.7 | 12.2 |
| 7. EAZ13473 | 27.2 | 23.8 | 23.5 | 23.5 | 23.2 | 25.1 | 23.3 | 21.9 | 20.3 | 23.9 | 13.6 |
| 8. EAY75756 | 27.7 | 24.0 | 24.0 | 24.0 | 22.9 | 25.0 | 22.9 | 20.8 | 20.3 | 22.3 | 13.3 |
| 9. EAY95411 | 26.8 | 24.1 | 23.5 | 23.8 | 22.4 | 24.4 | 22.4 | 20.5 | 21.0 | 20.8 | 11.8 |
| 10. ABN08674 | 38.0 | 49.9 | 43.5 | 43.5 | 47.7 | 47.6 | 47.3 | 21.3 | 44.5 | 19.1 | 8.1 |
| 11. BAF01674 | 72.1 | 99.7 | 46.1 | 46.0 | 62.3 | 50.1 | 62.2 | 29.3 | 43.8 | 20.1 | 8.7 |
| 12. NP_850387 | 72.2 | 99.8 | 46.0 | 45.9 | 62.4 | 50.2 | 62.3 | 29.3 | 43.9 | 20.1 | 8.7 |
| 13. BAD44158 | | 72.1 | 33.6 | 33.6 | 44.6 | 38.7 | 44.6 | 41.0 | 35.9 | 24.8 | 12.2 |
| 14. AAN72258 | 72.1 | | 45.7 | 45.6 | 62.2 | 50.2 | 62.1 | 29.2 | 43.8 | 20.1 | 8.7 |
| 15. BAD19387 | 42.0 | 58.1 | | 99.9 | 40.8 | 44.7 | 40.7 | 20.1 | 40.7 | 20.7 | 8.0 |
| 16. EAZ25008 | 42.0 | 58.1 | 100.0 | | 40.7 | 44.6 | 40.6 | 20.1 | 40.6 | 20.7 | 8.0 |
| 17. CAB91599 | 50.9 | 70.3 | 53.9 | 53.9 | | 43.3 | 99.9 | 21.8 | 38.4 | 17.9 | 8.2 |
| 18. CAO45312 | 47.8 | 63.7 | 56.8 | 56.8 | 54.9 | | 43.2 | 22.6 | 77.7 | 20.6 | 8.9 |
| 19. AAL24360 | 50.9 | 70.2 | 53.8 | 53.8 | 99.9 | 54.5 | | 21.8 | 38.3 | 17.9 | 8.3 |
| 20. AAC64305 | 41.3 | 29.4 | 23.9 | 23.9 | 23.9 | 25.7 | 23.9 | | 18.9 | 16.2 | 26.5 |
| 21. CAN66991 | 49.7 | 58.7 | 52.9 | 52.9 | 50.6 | 81.8 | 50.6 | 23.7 | | 19.5 | 8.7 |
| 22. XP001701452 | 38.9 | 29.1 | 30.7 | 30.7 | 26.6 | 31.3 | 26.6 | 26.2 | 31.7 | | 14.2 |
| 23. XP001419857 | 18.9 | 13.5 | 12.4 | 12.4 | 11.6 | 13.5 | 11.6 | 43.1 | 12.9 | 20.3 | |

[0459] Concerning IPPT, global percentages of similarity and identity between full length polypeptide sequences useful in performing the methods of the invention were determined using one of the methods available in the art, the MatGAT (Matrix Global Alignment Tool) software (BMC Bioinformatics. 2003 4:29. MatGAT: an application that generates similarity/identity matrices using protein or DNA sequences. Campanella J J, Bitincka L, Smalley J; software hosted by Ledion Bitincka). MatGAT software generates similarity/identity matrices for DNA or protein sequences without needing pre-alignment of the data. The program performs a series of pair-wise alignments using the Myers and Miller global alignment algorithm (with a gap opening penalty of 12, and a gap extension penalty of 2), calculates similarity and identity using for example Blosum 62 (for polypeptides), and then places the results in a distance matrix. Sequence similarity is shown in the bottom half of the dividing line and sequence identity is shown in the top half of the diagonal dividing line.

[0460] Parameters used in the comparison were:
[0461] Scoring matrix: Blosum62
[0462] First Gap: 12
[0463] Extending gap: 2

[0464] Results of the software analysis are shown in Table B4 for the global similarity and identity over the full length of the polypeptide sequences (excluding the partial polypeptide sequences).

[0465] The percentage identity between the full length polypeptide sequences useful in performing the methods of the invention can be as low as 39% amino acid identity compared to SEQ ID NO: 144.

TABLE B4
MatGAT results for global similarity and identity over the
full length of the polypeptide sequences of Table A4.

| | 1 | 2 | 3 | 4 | 5 | 6 | 7 | 8 | 9 | 10 | 11 | 12 | 13 | 14 | 15 | 16 |
|---|---|---|---|---|---|---|---|---|---|---|---|---|---|---|---|---|
| 1. Synec_{—}IPPT | | 55 | 54 | 42 | 51 | 53 | 41 | 42 | 41 | 41 | 45 | 42 | 44 | 39 | 41 | 39 |
| 2. Acama_IPPT | 70 | | 65 | 48 | 58 | 66 | 39 | 42 | 40 | 42 | 43 | 42 | 42 | 41 | 41 | 42 |
| 3. Anava_IPPT | 71 | 76 | | 49 | 66 | 94 | 39 | 41 | 41 | 42 | 43 | 43 | 43 | 41 | 42 | 43 |
| 4. Globa_IPPT | 65 | 64 | 63 | | 45 | 49 | 35 | 40 | 36 | 37 | 39 | 37 | 38 | 37 | 38 | 37 |
| 5. Micae_IPPT | 67 | 72 | 76 | 62 | | 64 | 43 | 39 | 42 | 42 | 42 | 44 | 42 | 42 | 43 | 42 |
| 6. Nossp_IPPT | 70 | 76 | 96 | 63 | 76 | | 39 | 42 | 40 | 41 | 43 | 42 | 43 | 40 | 41 | 42 |
| 7. Proma1375_IPPT | 64 | 64 | 62 | 60 | 63 | 61 | | 60 | 53 | 54 | 56 | 54 | 57 | 53 | 53 | 54 |
| 8. Proma9211_IPPT | 61 | 60 | 63 | 61 | 61 | 62 | 79 | | 52 | 53 | 58 | 53 | 57 | 51 | 50 | 52 |
| 9. Proma9215_IPPT | 61 | 60 | 61 | 59 | 65 | 60 | 75 | 73 | | 87 | 50 | 83 | 50 | 70 | 88 | 71 |
| 10. Proma9301_IPPT | 62 | 61 | 60 | 59 | 63 | 60 | 76 | 73 | 94 | | 50 | 85 | 49 | 70 | 88 | 71 |
| 11. Proma9303_IPPT | 62 | 60 | 63 | 58 | 61 | 63 | 74 | 75 | 70 | 70 | | 49 | 98 | 49 | 50 | 50 |
| 12. Proma9312_IPPT | 64 | 63 | 64 | 60 | 66 | 64 | 74 | 75 | 91 | 93 | 71 | | 49 | 71 | 84 | 72 |
| 13. Proma9313_IPPT | 62 | 59 | 62 | 57 | 61 | 61 | 74 | 74 | 69 | 70 | 99 | 71 | | 49 | 49 | 49 |
| 14. Proma9515_IPPT | 61 | 61 | 61 | 58 | 62 | 59 | 73 | 70 | 84 | 83 | 67 | 82 | 68 | | 70 | 84 |
| 15. Proma9601_IPPT | 62 | 59 | 63 | 59 | 63 | 62 | 75 | 71 | 94 | 95 | 70 | 91 | 70 | 82 | | 70 |
| 16. PromaMED4_IPPT | 61 | 62 | 61 | 60 | 63 | 61 | 76 | 71 | 86 | 84 | 69 | 84 | 69 | 92 | 84 | |
| 17. PromaNATL1A_IPPT | 61 | 62 | 63 | 60 | 61 | 62 | 75 | 72 | 68 | 70 | 70 | 72 | 70 | 72 | 69 | 70 |
| 18. PromaNATL2A_IPPT | 61 | 61 | 61 | 59 | 61 | 60 | 74 | 71 | 67 | 70 | 69 | 72 | 69 | 71 | 69 | 70 |
| 19. Synec307_IPPT | 61 | 62 | 62 | 60 | 61 | 60 | 70 | 69 | 67 | 68 | 74 | 69 | 72 | 66 | 68 | 66 |
| 20. Synec6803_IPPT | 70 | 72 | 73 | 63 | 76 | 73 | 65 | 63 | 66 | 63 | 63 | 64 | 63 | 61 | 64 | 62 |
| 21. Synec7803_IPPT | 61 | 57 | 59 | 55 | 62 | 59 | 70 | 70 | 64 | 64 | 76 | 64 | 76 | 64 | 63 | 64 |
| 22. Synec8102_IPPT | 67 | 62 | 63 | 60 | 61 | 65 | 73 | 71 | 64 | 65 | 83 | 66 | 81 | 64 | 66 | 66 |
| 23. Synec9311_IPPT | 62 | 60 | 60 | 61 | 63 | 60 | 72 | 71 | 66 | 66 | 79 | 67 | 78 | 67 | 66 | 67 |
| 24. Synec9605_IPPT | 65 | 61 | 63 | 60 | 61 | 63 | 73 | 76 | 66 | 67 | 82 | 69 | 80 | 66 | 67 | 67 |
| 25. Synec9902_IPPT | 66 | 61 | 63 | 59 | 61 | 63 | 74 | 75 | 66 | 66 | 80 | 69 | 79 | 67 | 65 | 68 |
| 26. Synecsp_IPPT | 62 | 60 | 60 | 60 | 60 | 59 | 54 | 53 | 52 | 52 | 54 | 54 | 53 | 49 | 53 | 50 |
| 27. Theel_IPPT | 66 | 72 | 70 | 60 | 67 | 70 | 63 | 58 | 59 | 61 | 62 | 61 | 61 | 58 | 59 | 58 |
| 28. Trier_IPPT | 69 | 72 | 79 | 63 | 73 | 79 | 63 | 62 | 61 | 60 | 59 | 63 | 58 | 60 | 61 | 61 |
| 29. Escco_miaA | 57 | 55 | 53 | 57 | 57 | 53 | 54 | 55 | 49 | 50 | 54 | 50 | 53 | 51 | 52 | 51 |
| 30. Arath_IPT2 | 37 | 35 | 35 | 35 | 36 | 35 | 33 | 32 | 33 | 34 | 33 | 34 | 32 | 33 | 34 | 33 |
| 31. Sacce_MOD5_IPPT | 38 | 36 | 36 | 39 | 40 | 35 | 36 | 35 | 33 | 34 | 33 | 35 | 33 | 34 | 34 | 36 |
| 32. Homsa_IPPT | 36 | 36 | 35 | 35 | 39 | 36 | 36 | 36 | 34 | 34 | 35 | 36 | 34 | 33 | 34 | 34 |
| | 17 | 18 | 19 | 20 | 21 | 22 | 23 | 24 | 25 | 26 | 27 | 28 | 29 | 30 | 31 | 32 |
| 1. Synec_{—}IPPT | 40 | 41 | 44 | 52 | 42 | 44 | 42 | 46 | 45 | 46 | 49 | 53 | 39 | 20 | 22 | 20 |
| 2. Acama_IPPT | 38 | 38 | 44 | 60 | 40 | 42 | 43 | 42 | 44 | 49 | 59 | 58 | 35 | 21 | 22 | 23 |
| 3. Anava_IPPT | 40 | 39 | 46 | 62 | 40 | 43 | 42 | 43 | 45 | 49 | 56 | 65 | 35 | 20 | 21 | 23 |
| 4. Globa_IPPT | 40 | 39 | 44 | 46 | 38 | 41 | 41 | 41 | 41 | 46 | 48 | 45 | 37 | 21 | 22 | 19 |
| 5. Micae_IPPT | 39 | 39 | 43 | 61 | 42 | 42 | 43 | 41 | 43 | 46 | 52 | 59 | 35 | 21 | 23 | 23 |
| 6. Nossp_IPPT | 41 | 40 | 44 | 62 | 41 | 44 | 42 | 43 | 45 | 47 | 55 | 64 | 35 | 21 | 21 | 23 |
| 7. Proma1375_IPPT | 54 | 54 | 50 | 44 | 52 | 54 | 52 | 55 | 56 | 36 | 40 | 40 | 33 | 19 | 22 | 21 |
| 8. Proma9211_IPPT | 54 | 53 | 48 | 42 | 53 | 52 | 52 | 56 | 55 | 35 | 38 | 40 | 35 | 17 | 21 | 19 |
| 9. Proma9215_IPPT | 51 | 50 | 46 | 43 | 46 | 47 | 47 | 47 | 47 | 34 | 40 | 41 | 31 | 18 | 19 | 19 |
| 10. Proma9301_IPPT | 52 | 52 | 46 | 43 | 47 | 47 | 47 | 48 | 47 | 36 | 41 | 40 | 32 | 18 | 21 | 20 |
| 11. Proma9303_IPPT | 53 | 51 | 58 | 46 | 64 | 65 | 67 | 64 | 65 | 41 | 45 | 41 | 37 | 19 | 21 | 20 |
| 12. Proma9312_IPPT | 54 | 53 | 47 | 44 | 48 | 48 | 48 | 49 | 49 | 36 | 41 | 42 | 32 | 17 | 20 | 20 |
| 13. Proma9313_IPPT | 53 | 51 | 58 | 46 | 64 | 65 | 66 | 64 | 65 | 40 | 45 | 41 | 37 | 19 | 21 | 20 |
| 14. Proma9515_IPPT | 56 | 55 | 44 | 42 | 47 | 46 | 46 | 49 | 48 | 36 | 41 | 39 | 31 | 18 | 21 | 19 |
| 15. Proma9601_IPPT | 52 | 51 | 45 | 43 | 46 | 47 | 47 | 47 | 47 | 36 | 40 | 41 | 31 | 18 | 20 | 21 |
| 16. PromaMED4_IPPT | 53 | 53 | 46 | 45 | 47 | 49 | 48 | 50 | 48 | 35 | 40 | 40 | 31 | 19 | 22 | 19 |
| 17. PromaNATL1A_IPPT | | 94 | 50 | 42 | 47 | 51 | 49 | 52 | 51 | 35 | 40 | 39 | 35 | 19 | 22 | 20 |
| 18. PromaNATL2A_IPPT | 96 | | 50 | 43 | 49 | 51 | 50 | 52 | 51 | 36 | 40 | 39 | 34 | 19 | 22 | 20 |
| 19. Synec307_IPPT | 68 | 67 | | 45 | 55 | 57 | 58 | 58 | 56 | 40 | 46 | 41 | 36 | 20 | 21 | 21 |
| 20. Synec6803_IPPT | 63 | 61 | 61 | | 43 | 47 | 43 | 46 | 45 | 46 | 51 | 61 | 35 | 21 | 22 | 20 |
| 21. Synec7803_IPPT | 65 | 64 | 68 | 61 | | 68 | 71 | 66 | 66 | 39 | 41 | 39 | 35 | 19 | 21 | 19 |
| 22. Synec8102_IPPT | 71 | 70 | 75 | 64 | 78 | | 67 | 79 | 76 | 41 | 43 | 43 | 36 | 18 | 23 | 20 |
| 23. Synec9311_IPPT | 68 | 68 | 70 | 65 | 81 | 80 | | 66 | 68 | 41 | 43 | 41 | 37 | 20 | 21 | 19 |
| 24. Synec9605_IPPT | 71 | 69 | 72 | 63 | 78 | 87 | 80 | | 78 | 41 | 45 | 44 | 37 | 18 | 20 | 19 |
| 25. Synec9902_IPPT | 72 | 71 | 71 | 63 | 77 | 87 | 80 | 87 | | 39 | 44 | 44 | 37 | 19 | 21 | 20 |
| 26. Synecsp_IPPT | 52 | 51 | 54 | 58 | 53 | 54 | 56 | 55 | 53 | | 50 | 45 | 35 | 19 | 25 | 25 |
| 27. Theel_IPPT | 59 | 59 | 59 | 65 | 60 | 60 | 62 | 61 | 60 | 62 | | 51 | 36 | 20 | 22 | 23 |
| 28. Trier_IPPT | 62 | 60 | 57 | 73 | 60 | 62 | 62 | 61 | 63 | 59 | 69 | | 35 | 20 | 21 | 21 |
| 29. Escco_miaA | 54 | 52 | 51 | 54 | 52 | 54 | 56 | 54 | 53 | 51 | 54 | 54 | | 22 | 21 | 22 |
| 30. Arath_IPT2 | 33 | 32 | 32 | 35 | 33 | 33 | 34 | 32 | 33 | 34 | 35 | 35 | 38 | | 25 | 28 |
| 31. Sacce_MOD5_IPPT | 37 | 36 | 33 | 37 | 34 | 35 | 35 | 33 | 37 | 38 | 36 | 37 | 37 | 47 | | 32 |
| 32. Homsa_IPPT | 35 | 34 | 35 | 35 | 33 | 35 | 34 | 35 | 36 | 38 | 38 | 38 | 39 | 55 | 51 | |

Concerning SHR, global percentages of similarity and identity between full length polypeptide sequences useful in performing the methods of the invention is determined using one of the methods available in the art, the MatGAT (Matrix Global Alignment Tool) software (BMC Bioinformatics. 2003 4:29. MatGAT: an application that generates similarity/identity matrices using protein or DNA sequences. Campanella JJ, Bitincka L, Smalley J; software hosted by Ledion Bitincka). MatGAT software generates similarity/identity matrices for DNA or protein sequences without needing pre-alignment of the data. The program performs a series of pair-wise alignments using the Myers and Miller global alignment algorithm (with a gap opening penalty of 12, and a gap extension penalty of 2), calculates similarity and identity using for example Blosum 62 (for polypeptides), and then places the results in a distance matrix.
Parameters used in the comparison are:

| Scoring matrix: | Blosum62 |
|---|---|
| First Gap: | 12 |
| Extending gap: | 2 |

### Example 4

### Identification of Domains Comprised in Polypeptide Sequences Useful in Performing the Methods of the Invention

[0466] The Integrated Resource of Protein Families, Domains and Sites (InterPro) database is an integrated interface for the commonly used signature databases for text- and sequence-based searches. The InterPro database combines these databases, which use different methodologies and varying degrees of biological information about well-characterized proteins to derive protein signatures. Collaborating databases include SWISS-PROT, PROSITE, TrEMBL, PRINTS, Panther, Propom and Pfam, Smart and TIGRFAMs. Pfam is a large collection of multiple sequence alignments and hidden Markov models covering many common protein domains and families. Pfam is hosted at the Sanger Institute server in the United Kingdom. Interpro is hosted at the European Bioinformatics Institute in the United Kingdom.

[0467] The results of the InterPro scan of the polypeptide sequence as represented by SEQ ID NO: 44 are presented in Table C1.

TABLE C1
InterPro scan results (major accession numbers) of the polypeptide
sequence as represented by SEQ ID NO: 44.

| | | | Amino acid |
|---|---|---|---|
| | Accession | Accession | coordinates on |
| Database | number | name | SEQ ID NO 44 |
| InterPro | IPR001026 | Epsin, N-terminal | |
| HMMPfam | PF01417 | ENTH | 25-148 |
| HMMSmart | SM00273 | ENTH | 26-152 |
| ProfileScan | PS50942 | ENTH | 20-152 |
| InterPro | IPR008943 | Phosphoinositide-binding | |
| | | clathrin adaptor, N-terminal | |
| superfamily | SSF48473 | PI_bind_N | 25-238 |

[0468] The results of the InterPro scan of the polypeptide sequence as represented by SEQ ID NO: 144 are presented in Table C2.

TABLE C2
InterPro scan results of the polypeptide sequence as
represented by SEQ ID NO: 144

| | | Integrated | |
|---|---|---|---|
| | Integrated | database | |
| InterPro accession | database | accession | Integrated database accession |
| number and name | name | number | name |
| IPR002627 | BlastProDom | PD004674 | MIAA_SYNP7_Q8GIT6; |
| tRNA | | | |
| isopentenyltransferase | | | |
| IPR002627 | HMMPfam | PF01715.6 | IPP transferase |
| tRNA | | | |
| isopentenyltransferase | | | |
| IPR002627 | HMMTigr | TIGR00174 | miaA: tRNA delta(2)- |
| tRNA | | | isopentenylpyrophosphate |
| isopentenyltransferase | | | |
| IPR011593 | BlastProDom | PD005388 | MIAA_SYNP7_Q8GIT6 |
| Isopentenyl | | | |
| transferase-like | | | |
| IPR non-integrated | tmhmm | PTHR11088 | TRNA DELTA(2)- |
| | | | ISOPENTENYLPYROPHOSPHATE |
| | | | TRANSFERASE-RELATED |
| IPR non-integrated | superfamily | SSF52540 | P-loop containing nucleoside |
| | | | triphosphate hydrolases |

### Example 5

### Topology Prediction of the Polypeptide Sequences Useful in Performing the Methods of the Invention

[0469] TargetP 1.1 predicts the subcellular location of eukaryotic proteins. The location assignment is based on the predicted presence of any of the N-terminal pre-sequences: chloroplast transit peptide (cTP), mitochondrial targeting peptide (mTP) or secretory pathway signal peptide (SP). Scores on which the final prediction is based are not really probabilities, and they do not necessarily add to one. However, the location with the highest score is the most likely according to TargetP, and the relationship between the scores (the reliability class) may be an indication of how certain the prediction is. The reliability class (RC) ranges from 1 to 5, where 1 indicates the strongest prediction. TargetP is maintained at the server of the Technical University of Denmark.

[0470] For the sequences predicted to contain an N-terminal presequence a potential cleavage site can also be predicted.

[0471] A number of parameters are selected, such as organism group (non-plant or plant), cutoff sets (none, predefined set of cutoffs, or user-specified set of cutoffs), and the calculation of prediction of cleavage sites (yes or no).

[0472] Many other algorithms can be used to perform such analyses, including:
[0473] ChloroP 1.1 hosted on the server of the Technical University of Denmark;
[0474] Protein Prowler Subcellular Localisation Predictor version 1.2 hosted on the server of the Institute for Molecular Bioscience, University of Queensland, Brisbane, Australia;
[0475] PENCE Proteome Analyst PA-GOSUB 2.5 hosted on the server of the University of Alberta, Edmonton, Alberta, Canada;
[0476] TMHMM, hosted on the server of the Technical University of Denmark

[0477] Concerning SEQ ID NO:44, a number of parameters were selected, such as organism group (non-plant or plant), cutoff sets (none, predefined set of cutoffs, or user-specified set of cutoffs), and the calculation of prediction of cleavage sites (yes or no).

[0478] The results of TargetP 1.1 analysis of the polypeptide sequence as represented by SEQ ID NO: 44 are presented Table D. The “plant” organism group has been selected, no cutoffs defined, and the predicted length of the transit peptide requested. The subcellular localization of the polypeptide sequence as represented by SEQ ID NO: 44 may be the cytoplasm or nucleus, no transit peptide is predicted.

TABLE D
TargetP 1.1 analysis of the polypeptide sequence as
represented by SEQ ID NO: 44

| | |
|---|---|
| Length (AA) | 560 |
| Chloroplastic transit peptide | 0.105 |
| Mitochondrial transit peptide | 0.100 |
| Secretory pathway signal peptide | 0.168 |
| Other subcellular targeting | 0.872 |
| Predicted Location | / |
| Reliability class | 2 |
| Predicted transit peptide length | / |

### Example 6

### Assay Related to the Polypeptide Sequences Useful in Performing the Methods of the Invention

[0479] The polypeptide sequence as represented by SEQ ID NO: 2 or SEQ ID NO: 4 is a transcription factor with DNA binding activity. The ability of a transcription factor to bind to a specific DNA sequence can be tested by electrophoretic mobility shift assays (EMSAs; also called gel retardation assays), which is well known in the art, and reported specifically for TCPs by Kosugi & Ohashi (2002) Plant J 30: 337-348, and by Li et al. (2005) PNAS 102(36): 12978-83. Also reported by Kosugi & Ohashi are methods to detect dimerization partners and specifity, using for example, the yeast two-hybrid system, while Li et al. describe chromatin immunoprecipitation experiments to characterize the promoters to which TCPs bind to.

[0480] Concerning Epsin-like polypeptides, lipid binding may be performed as described by Hom et al. (2007). Solutions of phosphatidylcholine, phosphatidylethanolamine, phosphatidylserine (Avanti) and Phosphatidylinositol(4,5) bisphosphate diC16 (C16-PtdIns(4,5)P2, Echelon Biosciences Inc.) dissolved in CHCl3/MeOH/H2O (65:25:4, by volume) were mixed and dried down under vacuum. The lipids were resuspended in 50 mM Tris, 100 mM KCl (pH 7.0) and incubated at 64° C. for 1 h. The liposomes were then frozen in liquid nitrogen and thawed at 37° C. for three cycles. The liposome solution was passed through an Avanti extruder to produce 1.0 μm liposomes. Liposomes were collected by centrifugation at 25,000 g for 10 min and resuspended to a final concentration of 2 mM total lipids in 100 μl 20 mM Tris, 100 mM KCl buffer (pH 6.0, 7.0 or 8.0). Liposomes were incubated with the GST-fusion ENTH and ANTH domains or GST (2-5 μg/ml final protein concentration) for 30 min at room temperature and then collected again by centrifugation. The liposome pellets were resuspended in 100 μl of buffer and analyzed by SDS-PAGE and Coomassie brilliant blue staining for the presence of lipid-binding proteins.

[0481] Concerning IPPT, polypeptides useful in performing the methods of the invention display IPPT activity. Many assays exist to measure such IPPT activity, including complementation assays of a yeast strain with defective endogenous IPPT activity (encoded by the MOD5 gene; Golovko et al. (2002) Plant Molec Biol 49: 161-169), complementation assays of an E. coli strain with defective endogenous IPPT activity (encoded by the miaA gene; Dihanich et al. (1987) Mol Cell Biol 7: 177-184), or quantification of cytokinins in tRNA (Gray et al. (1996) Plant Physiol 110: 431-438, Miyawaki et al. (2006) Proc Natl Acad SCi USA 103(44): 16598-16603). A person skilled in the art is well aware of such experimental procedures to measure IPPT activity, including IPPT activity of an IPPT polypeptide as represented by SEQ ID NO: 144.

### Example 7

### Cloning of the Nucleic Acid Sequence Used in the Methods of the Invention

[0482] Cloning of the TCP Nucleic Acid Sequences

[0483] The nucleic acid sequences used in the methods of the invention was amplified by PCR using as template a custom-made Medicago cDNA library (in pCMV Sport 6.0; Invitrogen, Paisley, UK). PCR was performed using Hifi Taq DNA polymerase in standard conditions, using 200 ng of template in a 50 μl PCR mix. The primers used were:

TCP1-sense (SEQ ID NO: 39):
5′GGGGACAAGTTTGTACAAAAAAGCAGGCTTAAACAATGTCTAACC
ACAAGGAAACA 3′
TCP1-reverse, complementary (SEQ ID NO: 40):
5′GGGGACCACTTTGTACAAGAAAGCTGGGTGAATAAAGTACAAAAC
ACCGAA 3′
TCP2-sense (SEQ ID NO: 41):
5′ GGGGACAAGTTTGTACAAAAAAGCAGGCTTAAACAATGGAATTG
GAAGGTGATCAT 3′
TCP2-reverse, complementary (SEQ ID NO: 42):
5′ GGGGACCACTTTGTACAAGAAAGCTGGGTTCAGATCATACACTT
CTAATTGCTT 3′

which include the AttB sites for Gateway recombination. The amplified PCR fragment was purified also using standard methods. The first step of the Gateway procedure, the BP reaction, was then performed, during which the PCR fragment recombines in vivo with the pDONR201 plasmid to produce, according to the Gateway terminology, an “entry clone”, pTCP1 or pTCP2. Plasmid pDONR201 was purchased from Invitrogen, as part of the Gateway® technology.

[0484] The entry clone comprising SEQ ID NO: 1 or SEQ ID NO: 2 was then used in an LR reaction with a destination vector used for Oryza sativa transformation. This vector contained as functional elements within the T-DNA borders: a plant selectable marker; a screenable marker expression cassette; and a Gateway cassette intended for LR in vivo recombination with the nucleic acid sequence of interest already cloned in the entry clone. A rice GOS2 promoter or an HMGP promoter for constitutive expression was located upstream of this Gateway cassette.

[0485] After the LR recombination step, the resulting expression vector was transformed into Agrobacterium strain LBA4044 according to methods well known in the art.

[0486] Cloning of Epsin-Like Sequences

[0487] The nucleic acid sequence used in the methods of the invention was amplified by PCR using as template a custom-made Arabidopsis thaliana seedlings cDNA library (in pCMV Sport 6.0; Invitrogen, Paisley, UK). PCR was performed using Hifi Taq DNA polymerase in standard conditions, using 200 ng of template in a 50 μl PCR mix. The primers used were

prm09481
(SEQ ID NO: 46; sense, start codon in bold):
5′-ggggacaagtttgtacaaaaaagcaggcttaaacaatggatttc
atgaaggtcttc-3′
and
prm09482 (SEQ ID NO: 47; reverse,
complementary):
5′-ggggaccactttgtacaagaaagctgggttcacagacaatttca
ctgctt-3′,

which include the AttB sites for Gateway recombination. The amplified PCR fragment was purified also using standard methods. The first step of the Gateway procedure, the BP reaction, was then performed, during which the PCR fragment recombines in vivo with the pDONR201 plasmid to produce, according to the Gateway terminology, an “entry clone”, pEpsin-like. Plasmid pDONR201 was purchased from Invitrogen, as part of the Gateway® technology.

[0488] The entry clone comprising SEQ ID NO: 43 was then used in an LR reaction with a destination vector used for Oryza sativa transformation. This vector contained as functional elements within the T-DNA borders: a plant selectable marker; a screenable marker expression cassette; and a Gateway cassette intended for LR in vivo recombination with the nucleic acid sequence of interest already cloned in the entry clone. A rice GOS2 promoter (SEQ ID NO: 45) for root specific expression was located upstream of this Gateway cassette.

[0489] After the LR recombination step, the resulting expression vector pGOS2::Epsin-like (FIG. 4) was transformed into Agrobacterium strain LBA4044 according to methods well known in the art.

[0490] Cloning of Nucleic Acid Sequence as Represented by SEQ ID NO: 143

[0491] Unless otherwise stated, recombinant DNA techniques are performed according to standard protocols described in (Sambrook (2001) Molecular Cloning: a laboratory manual, 3rd Edition Cold Spring Harbor Laboratory Press, CSH, New York) or in Volumes 1 and 2 of Ausubel et al. (1994), Current Protocols in Molecular Biology, Current Protocols. Standard materials and methods for plant molecular work are described in Plant Molecular Biology Labfax (1993) by R. D. D. Croy, published by BIOS Scientific Publications Ltd (UK) and Blackwell Scientific Publications (UK).

[0492] The Synechococcus sp. PCC 7942 nucleic acid sequence encoding an IPPT polypeptide sequence as represented by SEQ ID NO: 144 was amplified by PCR using as template genomic DNA extracted Synechococcus sp. PCC 7942. The following primers, which include the AttB sites for Gateway recombination, were used for PCR amplification:

1) Prm 07646 (SEQ ID NO: 206, sense):
5′-ggggacaagtttgtacaaaaaagcaggcttaaacaatggaatcg
cgtttgaaacc-3′
2) Prm 07645 (SEQ ID NO: 207, reverse,
complementary):
5′-ggggaccactttgtacaagaaagctgggttcaaacgccctcact
ctttcg-3′

[0493] PCR was performed using Hifi Taq DNA polymerase in standard conditions. A PCR fragment of the expected length (including attB sites) was amplified and purified also using standard methods. The first step of the Gateway procedure, the BP reaction, was then performed, during which the PCR fragment recombined in vivo with the pDONR201 plasmid to produce, according to the Gateway terminology, an “entry clone”. Plasmid pDONR201 was purchased from Invitrogen, as part of the Gateway® technology.

[0494] Cloning of the SHR Nucleic Acid Sequence (SEQ ID NO: 208)

[0495] The nucleic acid sequence used in the methods of the invention was amplified by PCR using as template a custom-made Arabidopsis thaliana seedlings cDNA library (in pCMV Sport 6.0; Invitrogen, Paisley, UK). PCR was performed using Hifi Taq DNA polymerase in standard conditions, using 200 ng of template in a 50 μl PCR mix. The primers used were

(SEQ ID NO: 243; sense, start codon in bold):
5′-ggggacaagtttgtacaaaaaagcaggcttaaacaa
tggatactctctttagactagtca-3′
and
(SEQ ID NO: 244; reverse, complementary):
5′-ggggaccactttgtacaagaaagctgggtaaataaaaacaaccc
tttacg-3′,

which include the AttB sites for Gateway recombination. The amplified PCR fragment was purified also using standard methods. The first step of the Gateway procedure, the BP reaction, was then performed, during which the PCR fragment recombines in vivo with the pDONR201 plasmid to produce, according to the Gateway terminology, an “entry clone”, pSHR. Plasmid pDONR201 was purchased from Invitrogen, as part of the Gateway® technology.

[0496] The entry clone comprising SEQ ID NO: 208 was then used in an LR reaction with a destination vector used for Oryza sativa transformation. This vector contained as functional elements within the T-DNA borders: a plant selectable marker; a screenable marker expression cassette; and a Gateway cassette intended for LR in vivo recombination with the nucleic acid sequence of interest already cloned in the entry clone. A rice GOS2 promoter (SEQ ID NO: 242) for constitutive expression was located upstream of this Gateway cassette.

[0497] After the LR recombination step, the resulting expression vector pGOS2::SHR (FIG. 16) was transformed into Agrobacterium strain LBA4044 according to methods well known in the art.

### Example 8

### Expression Vector Construction Using the Nucleic Acid Sequence as Represented by SEQ ID NO: 143

[0498] The entry clone comprising SEQ ID NO: 143 was subsequently used in an LR reaction with a destination vector used for Oryza sativa transformation. This vector contained as functional elements within the T-DNA borders: a plant selectable marker; a screenable marker expression cassette; and a Gateway cassette intended for LR in vivo recombination with the nucleic acid sequence of interest already cloned in the entry clone. A rice dehydrin promoter (SEQ ID NO: 204) for seed-specific expression was located upstream of this Gateway cassette. A second destination vector for Oryza sativa transformation was also produced, with a rice proteinase inhibitor promoter (SEQ ID NO: 205) also for seed-specific expression.

[0499] After the LR recombination step, the resulting expression vectors pDehydrin::IPPT and pProt_inhib::IPPT (FIG. 4) for seed-specific expression, were independently transformed into Agrobacterium strain LBA4044 according to methods well known in the art.

### Example 9

### Plant Transformation

### Rice Transformation

[0500] The Agrobacterium containing the expression vector was used to transform Oryza sativa plants. Mature dry seeds of the rice japonica cultivar Nipponbare were dehusked. Sterilization was carried out by incubating for one minute in 70% ethanol, followed by 30 minutes in 0.2% HgCl₂, followed by a 6 times 15 minutes wash with sterile distilled water. The sterile seeds were then germinated on a medium containing 2,4-D (callus induction medium). After incubation in the dark for four weeks, embryogenic, scutellum-derived calli were excised and propagated on the same medium. After two weeks, the calli were multiplied or propagated by subculture on the same medium for another 2 weeks. Embryogenic callus pieces were sub-cultured on fresh medium 3 days before co-cultivation (to boost cell division activity).

[0501] Agrobacterium strain LBA4404 containing the expression vector was used for co-cultivation. Agrobacterium was inoculated on AB medium with the appropriate antibiotics and cultured for 3 days at 28° C. The bacteria were then collected and suspended in liquid co-cultivation medium to a density (OD₆₀₀) of about 1. The suspension was then transferred to a Petri dish and the calli immersed in the suspension for 15 minutes. The callus tissues were then blotted dry on a filter paper and transferred to solidified, co-cultivation medium and incubated for 3 days in the dark at 25° C. Co-cultivated calli were grown on 2,4-D-containing medium for 4 weeks in the dark at 28° C. in the presence of a selection agent. During this period, rapidly growing resistant callus islands developed. After transfer of this material to a regeneration medium and incubation in the light, the embryogenic potential was released and shoots developed in the next four to five weeks. Shoots were excised from the calli and incubated for 2 to 3 weeks on an auxin-containing medium from which they were transferred to soil. Hardened shoots were grown under high humidity and short days in a greenhouse.

[0502] Approximately 35 independent T0 rice transformants were generated for one construct. The primary transformants were transferred from a tissue culture chamber to a greenhouse. After a quantitative PCR analysis to verify copy number of the T-DNA insert, only single copy transgenic plants that exhibit tolerance to the selection agent were kept for harvest of T1 seed. Seeds were then harvested three to five months after transplanting. The method yielded single locus transformants at a rate of over 50% (Aldemita and Hodges 1996, Chan et al. 1993, Hiei et al. 1994).

### Corn Transformation

[0503] Transformation of maize (Zea mays) is performed with a modification of the method described by Ishida et al. (1996) Nature Biotech 14(6): 745-50. Transformation is genotype-dependent in corn and only specific genotypes are amenable to transformation and regeneration. The inbred line A188 (University of Minnesota) or hybrids with A188 as a parent are good sources of donor material for transformation, but other genotypes can be used successfully as well. Ears are harvested from corn plant approximately 11 days after pollination (DAP) when the length of the immature embryo is about 1 to 1.2 mm. Immature embryos are cocultivated with Agrobacterium tumefaciens containing the expression vector, and transgenic plants are recovered through organogenesis. Excised embryos are grown on callus induction medium, then maize regeneration medium, containing the selection agent (for example imidazolinone but various selection markers can be used). The Petri plates are incubated in the light at 25° C. for 2-3 weeks, or until shoots develop. The green shoots are transferred from each embryo to maize rooting medium and incubated at 25° C. for 2-3 weeks, until roots develop. The rooted shoots are transplanted to soil in the greenhouse. T1 seeds are produced from plants that exhibit tolerance to the selection agent and that contain a single copy of the T-DNA insert.

### Wheat Transformation

[0504] Transformation of wheat is performed with the method described by Ishida et al. (1996) Nature Biotech 14(6): 745-50. The cultivar Bobwhite (available from CIMMYT, Mexico) is commonly used in transformation. Immature embryos are co-cultivated with Agrobacterium tumefaciens containing the expression vector, and transgenic plants are recovered through organogenesis. After incubation with Agrobacterium, the embryos are grown in vitro on callus induction medium, then regeneration medium, containing the selection agent (for example imidazolinone but various selection markers can be used). The Petri plates are incubated in the light at 25° C. for 2-3 weeks, or until shoots develop. The green shoots are transferred from each embryo to rooting medium and incubated at 25° C. for 2-3 weeks, until roots develop. The rooted shoots are transplanted to soil in the greenhouse. T1 seeds are produced from plants that exhibit tolerance to the selection agent and that contain a single copy of the T-DNA insert.

### Soybean Transformation

[0505] Soybean is transformed according to a modification of the method described in the Texas A&M U.S. Pat. No. 5,164,310. Several commercial soybean varieties are amenable to transformation by this method. The cultivar Jack (available from the Illinois Seed foundation) is commonly used for transformation. Soybean seeds are sterilised for in vitro sowing. The hypocotyl, the radicle and one cotyledon are excised from seven-day old young seedlings. The epicotyl and the remaining cotyledon are further grown to develop axillary nodes. These axillary nodes are excised and incubated with Agrobacterium tumefaciens containing the expression vector. After the cocultivation treatment, the explants are washed and transferred to selection media. Regenerated shoots are excised and placed on a shoot elongation medium. Shoots no longer than 1 cm are placed on rooting medium until roots develop. The rooted shoots are transplanted to soil in the greenhouse. T1 seeds are produced from plants that exhibit tolerance to the selection agent and that contain a single copy of the T-DNA insert.

### Rapeseed/Canola Transformation

[0506] Cotyledonary petioles and hypocotyls of 5-6 day old young seedling are used as explants for tissue culture and transformed according to Babic et al. (1998, Plant Cell Rep 17: 183-188). The commercial cultivar Westar (Agriculture Canada) is the standard variety used for transformation, but other varieties can also be used. Canola seeds are surface-sterilized for in vitro sowing. The cotyledon petiole explants with the cotyledon attached are excised from the in vitro seedlings, and inoculated with Agrobacterium (containing the expression vector) by dipping the cut end of the petiole explant into the bacterial suspension. The explants are then cultured for 2 days on MSBAP-3 medium containing 3 mg/l BAP, 3% sucrose, 0.7% Phytagar at 23° C., 16 hr light. After two days of co-cultivation with Agrobacterium, the petiole explants are transferred to MSBAP-3 medium containing 3 mg/l BAP, cefotaxime, carbenicillin, or timentin (300 mg/l) for 7 days, and then cultured on MSBAP-3 medium with cefotaxime, carbenicillin, or timentin and selection agent until shoot regeneration. When the shoots are 5-10 mm in length, they are cut and transferred to shoot elongation medium (MSBAP-0.5, containing 0.5 mg/l BAP). Shoots of about 2 cm in length are transferred to the rooting medium (MS0) for root induction. The rooted shoots are transplanted to soil in the greenhouse. T1 seeds are produced from plants that exhibit tolerance to the selection agent and that contain a single copy of the T-DNA insert.

### Alfalfa Transformation

[0507] A regenerating clone of alfalfa (Medicago sativa) is transformed using the method of (McKersie et al., 1999 Plant Physiol 119: 839-847). Regeneration and transformation of alfalfa is genotype dependent and therefore a regenerating plant is required. Methods to obtain regenerating plants have been described. For example, these can be selected from the cultivar Rangelander (Agriculture Canada) or any other commercial alfalfa variety as described by Brown D C W and A Atanassov (1985. Plant Cell Tissue Organ Culture 4: 111-112). Alternatively, the RA3 variety (University of Wisconsin) has been selected for use in tissue culture (Walker et al., 1978 Am J Bot 65:654-659). Petiole explants are cocultivated with an overnight culture of Agrobacterium tumefaciens C58C1 pMP90 (McKersie et al., 1999 Plant Physiol 119: 839-847) or LBA4404 containing the expression vector. The explants are cocultivated for 3 d in the dark on SH induction medium containing 288 mg/L Pro, 53 mg/L thioproline, 4.35 g/L K2SO4, and 100 μm acetosyringinone. The explants are washed in half-strength Murashige-Skoog medium (Murashige and Skoog, 1962) and plated on the same SH induction medium without acetosyringinone but with a suitable selection agent and suitable antibiotic to inhibit Agrobacterium growth. After several weeks, somatic embryos are transferred to BOi2Y development medium containing no growth regulators, no antibiotics, and 50 g/L sucrose. Somatic embryos are subsequently germinated on half-strength Murashige-Skoog medium. Rooted seedlings were transplanted into pots and grown in a greenhouse. T1 seeds are produced from plants that exhibit tolerance to the selection agent and that contain a single copy of the T-DNA insert.

### Cotton Transformation (Concerning TCP1/TCP2 and Epsin-Like Sequences)

[0508] Cotton is transformed using Agrobacterium tumefaciens according to the method described in U.S. Pat. No. 5,159,135. Cotton seeds are surface sterilised in 3% sodium hypochlorite solution during 20 minutes and washed in distilled water with 500 μg/ml cefotaxime. The seeds are then transferred to SH-medium with 50 μg/ml benomyl for germination. Hypocotyls of 4 to 6 days old seedlings are removed, cut into 0.5 cm pieces and are placed on 0.8% agar. An Agrobacterium suspension (approx. 108 cells per ml, diluted from an overnight culture transformed with the gene of interest and suitable selection markers) is used for inoculation of the hypocotyl explants. After 3 days at room temperature and lighting, the tissues are transferred to a solid medium (1.6 g/l Gelrite) with Murashige and Skoog salts with B5 vitamins (Gamborg et al., Exp. Cell Res. 50:151-158 (1968)), 0.1 mg/l 2,4-D, 0.1 mg/l 6-furfurylaminopurine and 750 μg/ml MgCL2, and with 50 to 100 μg/ml cefotaxime and 400-500 μg/ml carbenicillin to kill residual bacteria. Individual cell lines are isolated after two to three months (with subcultures every four to six weeks) and are further cultivated on selective medium for tissue amplification (30° C., 16 hr photoperiod). Transformed tissues are subsequently further cultivated on non-selective medium during 2 to 3 months to give rise to somatic embryos. Healthy looking embryos of at least 4 mm length are transferred to tubes with SH medium in fine vermiculite, supplemented with 0.1 mg/l indole acetic acid, 6 furfurylaminopurine and gibberelic acid. The embryos are cultivated at 30° C. with a photoperiod of 16 hrs, and plantlets at the 2 to 3 leaf stage are transferred to pots with vermiculite and nutrients. The plants are hardened and subsequently moved to the greenhouse for further cultivation.

### Cotton Transformation (Concerning IPPT)

[0509] Cotton (Gossypium hirsutum L.) transformation is performed using Agrobacterium tumefaciens, on hypocotyls explants. The commercial cultivars such as Coker 130 or Coker 312 (SeedCo, Lubbock, Tex.) are standard varieties used for transformation, but other varieties can also be used. The seeds are surface sterilized and germinated in the dark. Hypocotyl explants are cut from the germinated seedlings to lengths of about 1-1.5 centimeter. The hypotocyl explant is submersed in the Agrobacterium tumefaciens inoculum containing the expression vector, for 5 minutes then co-cultivated for about 48 hours on MS+1.8 mg/l KNO3+2% glucose at 24° C., in the dark. The explants are transferred the same medium containing appropriate bacterial and plant selectable markers (renewed several times), until embryogenic calli is seen. The calli are separated and subcultured until somatic embryos appear. Plantlets derived from the somatic embryos are matured on rooting medium until roots develop. The rooted shoots are transplanted to potting soil in the greenhouse. T1 seeds are produced from plants that exhibit tolerance to the selection agent and that contain a single copy of the T-DNA insert.

### Example 10

### Phenotypic Evaluation Procedure

[0510] 9.1 Evaluation Setup

[0511] Approximately 35 independent T0 rice transformants were generated. The primary transformants were transferred from a tissue culture chamber to a greenhouse for growing and harvest of T1 seed. Six events, of which the T1 progeny segregated 3:1 for presence/absence of the transgene, were retained. For each of these events, approximately 10 T1 seedlings containing the transgene (hetero- and homo-zygotes) and approximately 10 T1 seedlings lacking the transgene (nullizygotes) were selected by monitoring visual marker expression. The transgenic plants and the corresponding nullizygotes were grown side-by-side at random positions. Greenhouse conditions were of shorts days (12 hours light), 28° C. in the light and 22° C. in the dark, and a relative humidity of 70%.

[0512] In case of a confirmation round, four T1 events were further evaluated in the T2 generation following the same evaluation procedure as for the T1 generation but with more individuals per event. From the stage of sowing until the stage of maturity the plants were passed several times through a digital imaging cabinet. At each time point digital images (2048×1536 pixels, 16 million colours) were taken of each plant from at least 6 different angles.

[0513] Four T1 events were further evaluated in the T2 generation following the same evaluation procedure as for the T1 generation but with more individuals per event. From the stage of sowing until the stage of maturity the plants were passed several times through a digital imaging cabinet. At each time point digital images (2048×1536 pixels, 16 million colours) were taken of each plant from at least 6 different angles.

### Drought Screen (Concerning TCP1/TCP2 and SHR)

[0514] Concerning TCP1/TCP2, plants from T2 seeds were grown in potting soil under normal conditions until they approached the heading stage.

[0515] Concerning SHR, plants from T2 seeds are grown in potting soil under normal conditions until they approached the heading stage.

[0516] They were then transferred to a “dry” section where irrigation was withheld. Humidity probes were inserted in randomly chosen pots to monitor the soil water content (SWC). When SWC went below certain thresholds, the plants were automatically re-watered continuously until a normal level was reached again. The plants were then re-transferred again to normal conditions. The rest of the cultivation (plant maturation, seed harvest) was the same as for plants not grown under abiotic stress conditions. Growth and yield parameters are recorded as detailed for growth under normal conditions.

### Drought Screen (Epsin-Like Sequences)

[0517] Plants from T2 seeds are grown in potting soil under normal conditions until they approach the heading stage. They are then transferred to a “dry” section where irrigation is withheld. Humidity probes are inserted in randomly chosen pots to monitor the soil water content (SWC). When SWC goes below certain thresholds, the plants are automatically re-watered continuously until a normal level is reached again. The plants are then re-transferred again to normal conditions. The rest of the cultivation (plant maturation, seed harvest) is the same as for plants not grown under abiotic stress conditions. Growth and yield parameters are recorded as detailed for growth under normal conditions.

### Drought Screen (IPPT)

[0518] Plants from a selected number of events are grown in potting soil under normal conditions until they approached the heading stage. They are then transferred to a “dry” section where irrigation is withheld. Humidity probes are inserted in randomly chosen pots to monitor the soil water content (SWC). When SWC go below certain thresholds, the plants are automatically re-watered continuously until a normal level is reached again. The plants are then re-transferred to normal conditions. The rest of the cultivation (plant maturation, seed harvest) is the same as for plants not grown under abiotic stress conditions. Growth and yield parameters are recorded as detailed for growth under normal conditions.

### Nitrogen Use Efficiency Screen (Concerning TCP1/TCP2)

[0519] Rice plants from T2 seeds are grown in potting soil under normal conditions except for the nutrient solution. The pots were watered from transplantation to maturation with a specific nutrient solution containing reduced N nitrogen (N) content, usually between 7 to 8 times less. The rest of the cultivation (plant maturation, seed harvest) was the same as for plants not grown under abiotic stress. Growth and yield parameters are recorded as detailed for growth under normal conditions.

### Nitrogen Use Efficiency Screen (Concerning Epsin-Like Sequences)

[0520] Rice plants from T2 seeds are grown in potting soil under normal conditions except for the nutrient solution. The pots are watered from transplantation to maturation with a specific nutrient solution containing reduced N nitrogen (N) content, usually between 7 to 8 times less. The rest of the cultivation (plant maturation, seed harvest) is the same as for plants not grown under abiotic stress. Growth and yield parameters are recorded as detailed for growth under normal conditions.

### Nitrogen Use Efficiency Screen (Concerning SHR)

[0521] Rice plants from T2 seeds were grown in potting soil under normal conditions except for the nutrient solution. The pots were watered from transplantation to maturation with a specific nutrient solution containing reduced N nitrogen (N) content, usually between 7 to 8 times less. The rest of the cultivation (plant maturation, seed harvest) was the same as for plants not grown under abiotic stress. Growth and yield parameters are recorded as detailed for growth under normal conditions.

### Salt Stress Screen (Concerning Epsin-Like Sequences)

[0522] Plants are grown on a substrate made of coco fibers and argex (3 to 1 ratio). A normal nutrient solution is used during the first two weeks after transplanting the plantlets in the greenhouse. After the first two weeks, 25 mM of salt (NaCl) is added to the nutrient solution, until the plants are harvested. Seed-related parameters are then measured.

### Salt Stress Screen (Concerning IPPT)

[0523] Plants are grown on a substrate made of coco fibers and argex (3 to 1 ratio). A normal nutrient solution is used during the first two weeks after transplanting the plantlets in the greenhouse. After the first two weeks, 25 mM of salt (NaCl) is added to the nutrient solution, until the plants were harvested. Growth and yield parameters are recorded as detailed for growth under normal conditions.

### Reduced Nutrient (Nitrogen) Availability Screen (Concerning IPPT)

[0524] Plants from six events (T2 seeds) are grown in potting soil under normal conditions except for the nutrient solution. The pots are watered from transplantation to maturation with a specific nutrient solution containing reduced N nitrogen (N) content, usually between 7 to 8 times less. The rest of the cultivation (plant maturation, seed harvest) is the same as for plants not grown under abiotic stress. Growth and yield parameters are recorded as detailed for growth under normal conditions.

[0525] 9.2 Statistical Analysis: F Test

[0526] A two factor ANOVA (analysis of variants) was used as a statistical model for the overall evaluation of plant phenotypic characteristics. An F test was carried out on all the parameters measured of all the plants of all the events transformed with the gene of the present invention. The F test was carried out to check for an effect of the gene over all the transformation events and to verify for an overall effect of the gene, also known as a global gene effect. The threshold for significance for a true global gene effect was set at a 5% probability level for the F test. A significant F test value points to a gene effect, meaning that it is not only the mere presence or position of the gene that is causing the differences in phenotype.

[0527] Because two experiments with overlapping events were carried out, a combined analysis was performed. This is useful to check consistency of the effects over the two experiments, and if this is the case, to accumulate evidence from both experiments in order to increase confidence in the conclusion. The method used was a mixed-model approach that takes into account the multilevel structure of the data (i.e. experiment-event-segregants). P values were obtained by comparing likelihood ratio test to chi square distributions.

[0528] 9.3 Parameters Measured

### Biomass-Related Parameter Measurement

[0529] From the stage of sowing until the stage of maturity the plants were passed several times through a digital imaging cabinet. At each time point digital images (2048×1536 pixels, 16 million colours) were taken of each plant from at least 6 different angles.

[0530] The plant aboveground area (or leafy biomass) was determined by counting the total number of pixels on the digital images from aboveground plant parts discriminated from the background. This value was averaged for the pictures taken on the same time point from the different angles and was converted to a physical surface value expressed in square mm by calibration. Experiments show that the aboveground plant area measured this way correlates with the biomass of plant parts above ground. The above ground area is the area measured at the time point at which the plant had reached its maximal leafy biomass. The early vigour is the plant (seedling) aboveground area three weeks post-germination. Increase in root biomass is expressed as an increase in total root biomass (measured as maximum biomass of roots observed during the lifespan of a plant); or as an increase in the root/shoot index (measured as the ratio between root mass and shoot mass in the period of active growth of root and shoot).

[0531] Early vigour was determined by counting the total number of pixels from aboveground plant parts discriminated from the background. This value was averaged for the pictures taken on the same time point from different angles and was converted to a physical surface value expressed in square mm by calibration. The results described below are for plants three weeks post-germination.

### Seed-Related Parameter Measurements

[0532] The mature primary panicles were harvested, counted, bagged, barcode-labelled and then dried for three days in an oven at 37° C. The panicles were then threshed and all the seeds were collected and counted. The filled husks were separated from the empty ones using an air-blowing device. The empty husks were discarded and the remaining fraction was counted again. The filled husks were weighed on an analytical balance. The number of filled seeds was determined by counting the number of filled husks that remained after the separation step. The total seed yield was measured by weighing all filled husks harvested from a plant. Total seed number per plant was measured by counting the number of husks harvested from a plant. Thousand Kernel Weight (TKW) is extrapolated from the number of filled seeds counted and their total weight. The Harvest Index (HI) in the present invention is defined as the ratio between the total seed yield and the above ground area (mm²), multiplied by a factor 10⁶. The total number of flowers per panicle as defined in the present invention is the ratio between the total number of seeds and the number of mature primary panicles. The seed fill rate as defined in the present invention is the proportion (expressed as a %) of the number of filled seeds over the total number of seeds (or florets).

### Example 11

### Results of the Phenotypic Evaluation of the Transgenic Plants

[0533] The results of the evaluation of transgenic rice plants expressing a TCP1 or TCP2 nucleic are shown below. The % difference is transgenic plants compared to corresponding nullizygotes.

Results of the Evaluation of Rice Plants Expressing Construct pHMGP::TCP1(Medicago sativa) or pGOS2::TCP1 (Medicago sativa) Under Non-Stress and Drought Conditions

| | Drought | Non-stress |
|---|---|---|
| | pHMGP::TCP1 | pHMGP::TCP1 |
| Total seed | 42% | 11% |
| weight | | |
| No. filled seeds | 43% | 9% |
| Fill rate | 22% | |
| Flowers per | 7% | 4% |
| panicle | | |
| No. first panicles | | 7% |
| Harvest index | 36% | 7% |
| Aboveground | | <4% |
| area | | |
| Emergence | | 8% |
| vigour | | |
| TKW | | <5% |

[0534] A positive tendency was noticed in the following parameters: emergence vigour, total seed weight and TKW for construct pGOS2::TCP1 (Medicago sativa) under non-stress conditions.

Results of the Evaluation of Rice Plants Expressing Construct or pGOS2::TCP2(Medicago truncatula) Under Non-Stress and Drought Conditions

| | Drought | Non-stress |
|---|---|---|
| Parameter | pGOS2::TCP1 | pGOS2::TCP1 |
| Harvest Index | 21% | 9% |
| No. Filled Seeds | 23% | 5% |
| Fill rate | Na | 6% |
| Root-Shoot | Na | 9% |
| index | | |
| Total weight | 27% | <5% |
| seeds | | |
| No. Flowers per | 10% | Na |
| panicle | | |
| TKW | <5% | Na |
| No. first panicles | 8% | Na |

[0535] The results of the evaluation of transgenic rice plants expressing an Epsin-like nucleic acid are presented below. An increase of more than 5% was observed for total seed number, total seed yield, number of filled seeds, and fill rate. In addition, an increase of more than 5% in aboveground biomass and in early vigour was observed in both T1 and T2 generations for at least one event

TABLE E
Yield increase observed in plants expressing the Epsin-like
nucleic acid of SEQ ID NO: 44:

| | | | T2 | |
|---|---|---|---|---|
| | T1 | | | P-value |
| | Overall % | | Overall % | combined |
| Parameter | increase | P-value | increase | analysis |
| Total weight of seeds | >5 | 0.0011 | >5 | 0.0023 |
| Total number of seeds | >5 | 0.033 | >5 | 0.1068 |
| Number of filled seeds | >5 | 0.0017 | >5 | 0.0069 |
| Fill rate | >5 | 0.0024 | 2.7 | 0.0001 |

[0536] Results of the Phenotypic Evaluation of the Transgenic Rice Plants Expressing the Nucleic Acid Sequence Encoding an IPPT Polypeptide as Represented by SEQ ID NO: 144, Under the Control of a Dehydrin Seed-Specific Promoter

[0537] The results of the evaluation of T1 and T2 generation transgenic rice plants expressing the nucleic acid sequence encoding an IPPT polypeptide as represented by SEQ ID NO: 144, under the control of a dehydrin seed-specific promoter, and grown under normal growth conditions, are presented below.

[0538] There was a significant increase in the early vigor, in the aboveground biomass, in the total seed yield per plant, in the total number of seeds, in the number of filled seeds, in the number of flowers per panicle, and in the harvest index of the transgenic plants compared to corresponding nullizygotes (controls), as shown in Table F

TABLE F
Results of the evaluation of T1 and T2 generation transgenic rice
plants expressing the nucleic acid sequence encoding an IPPT
polypeptide as represented by SEQ ID NO: 144, under the
control of a dehydrin promoter for seed-specific expression.

| | 0verall average % | 0verall average % |
|---|---|---|
| | increase in 6 events | increase in 4 events |
| Trait | in the T1 generation | in the T2 generation |
| Early vigor | 25 | 25 |
| Aboveground biomass | 2 | 8 |
| Total seed yield per plant | 14 | 13 |
| Total number of seeds | 8 | 15 |
| Total number of filled seeds | 15 | 13 |
| Harvest index | 14 | 5 |
| Number of first panicles | 13 | 3 |

[0539] Results of the Phenotypic Evaluation of the Transgenic Rice Plants Expressing the Nucleic Acid Sequence Encoding an IPPT Polypeptide as Represented by SEQ ID NO: 144, Under the Control of a Proteinase Inhibitor Seed-Specific Promoter

[0540] The results of the evaluation of T1 generation transgenic rice plants expressing the nucleic acid sequence encoding an IPPT polypeptide as represented by SEQ ID NO: 144, under the control of a proteinase inhibitor seed-specific promoter, and grown under normal growth conditions, are presented below.

[0541] There was a significant increase in the early vigor, in the aboveground biomass, in the total seed yield per plant, in the total number of seeds, in the number of filled seeds, and in the number of flowers per panicle, of the transgenic plants compared to corresponding nullizygotes (controls), as shown in Table G.

TABLE G
Results of the evaluation of T1 generation transgenic rice plants
expressing the nucleic acid sequence encoding an IPPT polypeptide
as represented by SEQ ID NO: 144, under the control of a proteinase
inhibitor promoter for seed-specific expression.

| | Overall average % increase in the two |
|---|---|
| Trait | best events in the T1 generation |
| Early vigor | 34 |
| Aboveground biomass | 15 |
| Total seed yield per plant | 20 |
| Total number of seeds | 23 |

The results of the evaluation of transgenic rice plants expressing an
SHR nucleic acid under non-stress conditions are presented below.

| Parameter | % difference over controls |
|---|---|
| TKW | 7.3% |

[0542] The results of the evaluation of transgenic rice plants expressing an SHR nucleic acid under conditions of reduced nitrogen availability are presented below.

| Parameter | % difference over controls |
|---|---|
| Aboveground area | 10.2% |
| Emergence vigour | 23.2% |
| Root biomass | 23.6% |
| Fill rate | 25.3% |
| TKW | 7% |

1. A method for enhancing yield-related traits in plants relative to control plants, comprising modulating expression of a nucleic acid selected from the group consisting of:
a) a nucleic acid encoding a TCP1 or a TCP2 polypeptide in a plant,
b) a nucleic acid encoding an Epsin-like polypeptide, wherein said Epsin-like polypeptide comprises an ENTH domain in a plant,
c) a nucleic acid sequence encoding a tRNA delta(2)-isopentenylpyrophosphate transferase (IPPT) polypeptide, which IPPT polypeptide comprises (i) a tRNA isopentenyltransferase domain with an InterPro accession IPR002627; and (ii) an N-terminal ATP/GTP-binding site motif A (P-loop) in the seeds of a plant, and optionally selecting for plants having increased yield-related traits, and
d) a nucleic acid encoding an SHR polypeptide in plants grown under conditions of sub-optimal nutrient availability.

2. The method of claim 1, for enhancing yield-related traits in plants relative to control plants, comprising modulating expression of a nucleic acid encoding a TCP1 or a TCP2 polypeptide in a plant, said TCP1 polypeptide comprising:
(i) a TCP domain having at least 50%, 55%, 60%, 65%, 70%, 75%, 80%, 85%, 90%, 95% or more sequence identity to the TCP domain of any one of the sequences indicated in FIG. 1; and
(ii) a domain having at least 50%, 55%, 60%, 65%, 70%, 75%, 80%, 85%, 90%, 95% or more sequence identity to Domain A of any one of the sequences indicated in FIG. 1; and
(iii) a domain having at least 50%, 55%, 60%, 65%, 70%, 75%, 80%, 85%, 90%, 95% or more sequence identity to Domain B of any one of the sequences indicated in FIG. 1; and
(iv) a domain having at least 50%, 55%, 60%, 65%, 70%, 75%, 80%, 85%, 90%, 95% or more sequence identity to Domain C of any one of the sequences indicated in FIG. 1,
and said TCP2 polypeptide comprising:
(i) a TCP domain having at least 50%, 55%, 60%, 65%, 70%, 75%, 80%, 85%, 90%, 95% or more sequence identity to the TCP domain of any of the sequences indicated in FIG. 2; and
(ii) a domain having at least 50%, 55%, 60%, 65%, 70%, 75%, 80%, 85%, 90%, 95% or more sequence identity to Domain 1 of any of the sequences indicated in FIG. 2; and
(iii) a domain having at least 50%, 55%, 60%, 65%, 70%, 75%, 80%, 85%, 90%, 95% or more sequence identity to Domain 2 of any of the sequences indicated in FIG. 2; and
(iv) a domain having at least 50%, 55%, 60%, 65%, 70%, 75%, 80%, 85%, 90%, 95% or more sequence identity to Domain 3 of any of the sequences indicated in FIG. 2.

3. The method of claim 2, wherein said TCP2 polypeptide comprises:
(v) a domain having at least 50%, 55%, 60%, 65%, 70%, 75%, 80%, 85%, 90%, 95% or more sequence identity to Domain 4 of any of the sequences indicated in FIG. 2;
(vi) a domain having at least 50%, 55%, 60%, 65%, 70%, 75%, 80%, 85%, 90%, 95% or more sequence identity to Domain 5 of any of the sequences indicated in FIG. 2.

4. The method of claim 2, wherein said TCP1 polypeptide, when used in the construction of a TCP phylogenetic tree tends to cluster with the clade of TCP polypeptides comprising the polypeptide sequence as represented by SEQ ID NO: 2 rather than with any other TCP clade.

5. The method of claim 2, wherein said TCP2 polypeptide, when used in the construction of a TCP phylogenetic tree tends to cluster with the clade of TCP polypeptides comprising the polypeptide sequence as represented by SEQ ID NO: 4 rather than with any other TCP clade.

6. The method of claim 1, wherein said nucleic acid sequence encodes an orthologue or paralogue of SEQ ID NO: 2 or 4.

7. The method of claim 2, wherein said modulated expression is increased expression of a nucleic acid encoding a TCP1 or a TCP2 polypeptide.

8. The method of claim 7, wherein said increased expression is effected by any one or more of T-DNA activation tagging, TILLING, or homologous recombination.

9. The method of claim 7, wherein said increased expression is effected by introducing and expressing in a plant a nucleic acid sequence encoding a TCP1 or a TCP2 polypeptide.

10. The method of claim 1, wherein said enhanced yield-related traits comprise increased seed weight relative to control plants.

11. The method of claim 9, wherein said nucleic acid sequence is operably linked to a constitutive promoter, to a HMGP (High Mobility Group Protein) promoter, or to a GOS2 promoter.

12. The method of claim 9, wherein said nucleic acid sequence encoding a TCP1 or TCP2 polypeptide is of plant origin.

13. A plant or part thereof including seeds obtained by the method of claim 1, wherein said plant or part thereof comprises a nucleic acid transgene encoding a TCP1 or a TCP2 polypeptide.

14. A construct comprising:
(i) a nucleic acid sequence encoding a TCP1 or a TCP2 polypeptide;
(ii) one or more control sequences capable of driving expression of the nucleic acid sequence of (i); and optionally
(iii) a transcription termination sequence.

15. The construct of claim 14, wherein said one or more control sequences is at least a constitutive promoter, an HMGP, or GOS2 promoter.

16. A method for obtaining a plant having increased yield or seed yield relative to control plants comprising growing a plant which comprises the construct of claim 14.

17. A plant, plant part, or plant cell transformed with the construct of claim 14.

18. A method for the production of a transgenic plant having increased seed yield relative to control plants, which method comprises:
(i) introducing and expressing in a plant or plant cell a nucleic acid sequence encoding a TCP1 or a TCP2 polypeptide; and
(ii) cultivating the plant cell under conditions promoting plant growth and development.

19. A transgenic plant having increased yield or increased seed yield, relative to control plants, said increased yield resulting from increased expression of a nucleic acid encoding a TCP1 or a TCP2 polypeptide, or a transgenic plant cell derived from said transgenic plant.

20. The transgenic plant of claim 19, wherein said increased seed yield is one or more of the following: (i) increased seed weight; (ii) increased harvest index; (iii) increased Thousand Kernel Weight, (iv) increased number of flowers per panicle, (v) increased fill rate, or (vi) increased number of filled seeds.

21. The transgenic plant of claim 13, wherein said plant is a crop plant or a monocot or a cereal, or a transgenic plant cell derived from said transgenic plant.

22. Harvestable parts of the plant of claim 21, wherein said harvestable parts comprise seeds.

23. Products derived from the plant of claim 21 and/or from harvestable parts of said plant.

24. (canceled)

25. The method of claim 12, wherein the plant is from the Medicago family.

The application's sequence listing, which the Patent Office published only in electronic form, follows.

SEQUENCE LISTING (244 sequences)

SEQ ID NO: 1 - DNA, 708 bp, Medicago sativa
atgtctaaccacaaggaaacaacaactatcaccacaacaaccgatctagtagaacccacttctcaaaacgctataacagtaaaaaaaccgccgtcaaaagaccgtcacagtaaagtagacggacgaggaagacgcataagaatgcctataatttgcgccgcacgtgttttccagttaacacgtgagcttggtcataaatccgacggtcaaactattgaatggcttctccgtcaagctgaaccgtcgatcatcgccgccaccggtaccggaactactcctgcttctttctcttcgctttctgagcataaaccttttcttcaaccttctccttttattcttggtaaacgtttacgtgatgatgatggtgatgctgtttcggttgccgcacctactgctccgccggggttgtggcggccggattttgctcagctttggagctttgctgcggctgctcaaactccgccggaaggtttttctgtttctcagcataattcattgtttcatcatcaacagcaacaacaacaacaacagcaccagcaacagcaacaacagcaccaccaccagcagcatcaccagcagcaacaaggctctatgggtgaagcttccgcggcgaggttagggaattatcttcctggtcatctgaatttgttggcttcattgtctggtgggaatggaaattctggtcgtggagatgatgaagatcgttga

SEQ ID NO: 2 - protein, 235 aa, Medicago sativa
MSNHKETTTITTTTDLVEPTSQNAITVKKPPSKDRHSKVDGRGRRIRMPIICAARVFQLTRELGHKSDGQTIEWLLRQAEPSIIAATGTGTTPASFSSLSEHKPFLQPSPFILGKRLRDDDGDAVSVAAPTAPPGLWRPDFAQLWSFAAAAQTPPEGFSVSQHNSLFHHQQQQQQQQHQQQQQQHHHQQHHQQQQGSMGEASAARLGNYLPGHLNLLASLSGGNGNSGRGDDEDR

SEQ ID NO: 3 - DNA, 1251 bp, Medicago truncatula
atggaattggaaggtgatcatcatcaaagtaatggaatccgaagcagacccaatttccctcttcagcttttagagaaaaaagacaacaacatcctagatgtctccgaagaacaaacttgtacaaccaccggaaacgatggctgtactgccataatctcatcagaccagcagaaaaagcctccgccgaagcgagcttcgacgaaagaccggcacacgaaggtagacggacgaggccgccggatccgtatgccggcggcctgtgctgctagagtgttccagctcacgcgtgagctgggacataaatcagacggcgagacgattgagtggctgcttcaacaggcagagccagccgtcatcgccgccaccggaacaggaacaattccggccaactttacttcacttaatatatctcttagaagctcaggctcaaccatgtctgcgccgtctcactattttcgaggtaactactttaaccctagctcgttctcctccacggcggctcagcttagaaaccgggctgaatgggatagaactatgaacatgaacatgaacatgaacatgaacgttgtagctgatgattcaagaaggagtagtaactctaccatgttggaaaatccttcttctttatcagcaatgttgaatttcaacaacgtgcaaaatgctattctacaagcaaaacaagagcttcgggaagaaaacgccgctgccaccgcctccggtggtggcggaggatttgaattgttaggttcagattcagatggaagcatgggaagaaaaagaaggtcagagcaagaattattatcacaaaatatgggaagttatttgttacaatcaaatgtagggtcacttccttcaagtcatgcttcaaatacggcagcgttttggatggtaactggtaatgggaaccaaggtgttaatgttaatggtggtaatggaaatgatccaatttgggcaattccttctgttgggaataatggtatgtatagaggagctatgacatctcctaatggatttcatttcatgaattttgctgcatctccaatgaatcttatgccaggaagtcaattaggttcaggaatcgtcggcggtggtggtggaggtattttagccgaaagcaatctgagtatgctttcggctatgaatgcctataggcagatttcgacgaatggtatgtcaaattcgtcggggcaacatcacggcggaggtggaggaggagatgatgaacatgactcaagcagtcaacattcctaa

SEQ ID NO: 4 - protein, 416 aa, Medicago truncatula
MELEGDHHQSNGIRSRPNFPLQLLEKKDNNILDVSEEQTCTTTGNDGCTAIISSDQQKKPPPKRASTKDRHTKVDGRGRRIRMPAACAARVFQLTRELGHKSDGETIEWLLQQAEPAVIAATGTGTIPANFTSLNISLRSSGSTMSAPSHYFRGNYFNPSSFSSTAAQLRNRAEWDRTMNMNMNMNMNVVADDSRRSSNSTMLENPSSLSAMLNFNNVQNAILQAKQELREENAAATASGGGGGFELLGSDSDGSMGRKRRSEQELLSQNMGSYLLQSNVGSLPSSHASNTAAFWMVTGNGNQGVNVNGGNGNDPIWAIPSVGNNGMYRGAMTSPNGFHFMNFAASPMNLMPGSQLGSGIVGGGGGGILAESNLSMLSAMNAYRQISTNGMSNSSGQHHGGGGGGDDEHDSSSQHS

SEQ ID NO: 5 - DNA, 2193 bp, Artificial Sequence
  Promoter
aatccgaaaagtttctgcaccgttttcaccccctaactaacaatatagggaacgtgtgctaaatataaaatgagaccttatatatgtagcgctgataactagaactatgcaagaaaaactcatccacctactttagtggcaatcgggctaaataaaaaagagtcgctacactagtttcgttttccttagtaattaagtgggaaaatgaaatcattattgcttagaatatacgttcacatctctgtcatgaagttaaattattcgaggtagccataattgtcatcaaactcttcttgaataaaaaaatctttctagctgaactcaatgggtaaagagagagattttttttaaaaaaatagaatgaagatattctgaacgtattggcaaagatttaaacatataattatataattttatagtttgtgcattcgtcatatcgcacatcattaaggacatgtcttactccatcccaatttttatttagtaattaaagacaattgacttatttttattatttatcttttttcgattagatgcaaggtacttacgcacacactttgtgctcatgtgcatgtgtgagtgcacctcctcaatacacgttcaactagcaacacatctctaatatcactcgcctatttaatacatttaggtagcaatatctgaattcaagcactccaccatcaccagaccacttttaataatatctaaaatacaaaaaataattttacagaatagcatgaaaagtatgaaacgaactatttaggtttttcacatacaaaaaaaaaaagaattttgctcgtgcgcgagcgccaatctcccatattgggcacacaggcaacaacagagtggctgcccacagaacaacccacaaaaaacgatgatctaacggaggacagcaagtccgcaacaaccttttaacagcaggctttgcggccaggagagaggaggagaggcaaagaaaaccaagcatcctcctcctcccatctataaattcctccccccttttcccctctctatataggaggcatccaagccaagaagagggagagcaccaaggacacgcgactagcagaagccgagcgaccgccttcttcgatccatatcttccggtcgagttcttggtcgatctcttccctcctccacctcctcctcacagggtatgtgcccttcggttgttcttggatttattgttctaggttgtgtagtacgggcgttgatgttaggaaaggggatctgtatctgtgatgattcctgttcttggatttgggatagaggggttcttgatgttgcatgttatcggttcggtttgattagtagtatggttttcaatcgtctggagagctctatggaaatgaaatggtttagggtacggaatcttgcgattttgtgagtaccttttgtttgaggtaaaatcagagcaccggtgattttgcttggtgtaataaaagtacggttgtttggtcctcgattctggtagtgatgcttctcgatttgacgaagctatcctttgtttattccctattgaacaaaaataatccaactttgaagacggtcccgttgatgagattgaatgattgattcttaagcctgtccaaaatttcgcagctggcttgtttagatacagtagtccccatcacgaaattcatggaaacagttataatcctcaggaacaggggattccctgttcttccgatttgctttagtcccagaattttttttcccaaatatcttaaaaagtcactttctggttcagttcaatgaattgattgctacaaataatgcttttatagcgttatcctagctgtagttcagttaataggtaatacccctatagtttagtcaggagaagaacttatccgatttctgatctccatttttaattatatgaaatgaactgtagcataagcagtattcatttggattattttttttattagctctcaccccttcattattctgagctgaaagtctggcatgaactgtcctcaattttgttttcaaattcacatcgattatctatgcattatcctcttgtatctacctgtagaagtttctttttggttattccttgactgcttgattacagaaagaaatttatgaagctgtaatcgggatagttatactgcttgttcttatgattcatttcctttgtgcagttcttggtgtagcttgccactttcaccagcaaagttc

SEQ ID NO: 6 - DNA, 1130 bp, Artificial Sequence
  Promoter
catgcggctaatgtagatgctcactgcgctagtagtaaggtactccagtacattatggaatatacaaagctgtaatactcgtatcagcaagagagaggcacacaagttgtagcagtagcacaggattagaaaaacgggacgacaaatagtaatggaaaaacaaaaaaaaacaaggaaacacatggcaatataaatggagaaatcacaagaggaacagaatccgggcaatacgctgcgaaagtactcgtacgtaaaaaaaagaggcgcattcatgtgtggacagcgtgcagcagaagcagggatttgaaaccactcaaatccaccactgcaaaccttcaaacgaggccatggtttgaagcatagaaagcacaggtaagaagcacaacgccctcgctctccaccctcccacccaatcgcgacgcacctcgcggatcggtgacgtggcctcgccccccaaaaatatcccgcggcgtgaagctgacaccccgggcccacccacctgtcacgttggcacatgttggttatggttcccggccgcaccaaaatatcaacgcggcgcggcccaaaatttccaaaatcccgcccaagcccctggcgcgtgccgctcttccacccaggtccctctcgtaatccataatggcgtgtgtaccctcggctggttgtacgtgggcgggttaccctgggggtgtgggtggatgacgggtgggcccggaggaggtccggccccgcgcgtcatcgcggggcggggtgtagcgggtgcgaaaaggaggcgatcggtacgaaaattcaaattaggaggtggggggcggggcccttggagaataagcggaatcgcagatatgcccctgacttggcttggctcctcttcttcttatcccttgtcctcgcaaccccgcttccttctctcctctcctcttctcttctcttctctggtggtgtgggtgtgtccctgtctcccctctccttcctcctctcctttcccctcctctcttcccccctctcacaagagagagagcgccagactctccccaggtgaggtgagaccagtctttttgctcgattcgacgcgcctttcacgccgcctcgcgcggatctgaccgcttccctcgcccttctcgcaggattcagcc

SEQ ID NO: 7 - DNA, 753 bp, Arabidopsis thaliana
atgtctattaacaacaacaacaacaacaacaacaataacaacgatggtcttatgatctcatcaaacggagctttaatcgaacaacaaccatcagtcgttgtgaagaaaccaccggcgaaagatcgacatagcaaagtcgatggaagagggagaagaatccgtatgccgattatatgtgctgctcgtgtttttcagctaacgagagagcttggtcataagtcagatggccaaacaattgaatggttacttcgtcaagcagagccttctattatagctgcaacaggaactggtacaactccagcgagtttctcaactgcttctgtctctatccgtggagccaccaattctacttctttagatcataaacccacttctttacttggtggtacgtcaccgtttatacttgggaaacgtgttagagctgatgaggatagtaataatagtcataatcatagttctgttggtaaagatgagacctttacgacaacaccagctgggttttgggctgttccggcgaggccggattttggacaagtttggagttttgctggagctccacaagagatgtttttacaacaacaacatcatcatcagcaaccattgtttgttcatcagcaacagcaacaacaagctgcaatgggtgaagcttctgctgctagagttgggaattatcttccgggtcatcttaatttgcttgcttctttatccggtggatctcccgggtcggatcgaagagaggaagatccacgttaa

SEQ ID NO: 8 - protein, 250 aa, Arabidopsis thaliana
MSINNNNNNNNNNNDGLMISSNGALIEQQPSVVVKKPPAKDRHSKVDGRGRRIRMPIICAARVFQLTRELGHKSDGQTIEWLLRQAEPSIIAATGTGTTPASFSTASVSIRGATNSTSLDHKPTSLLGGTSPFILGKRVRADEDSNNSHNHSSVGKDETFTTTPAGFWAVPARPDFGQVWSFAGAPQEMFLQQQHHHQQPLFVHQQQQQQAAMGEASAARVGNYLPGHLNLLASLSGGSPGSDRREEDPR

SEQ ID NO: 9 - DNA, 636 bp, Oryza sativa
atgagctcccgcgacgccgccgccacgttccatgtctaccagcccgtgcagatcccgacggccacggtggcgcccgctgcggcagtgtcggcggcgccggcagaggccgtcgcccagctggtcccggcgccgagcaagaaggcggccggcgcggcgggtgggaaggaccggcacagcaaggtgaacgggcgcgggcggcgcgtgcggatgccgatcgtgtgcgcggcgcgggtgttccagctcacgcgggagctggggctcaagtccgacggccagaccatcgagtggctgctccgccaggccgagccgtccatcctcgccgccacggggaccggcaccaccccggccgccttcgtctcctcctccgcgccgtccacctcctcctcgcaccagcacaccctcctcggcaagcgccagcgccaggagtccgccgccgccgacgccgtctccgtcgccggcgccgcgtccgcgttctgggcggcgctgcccgcaccaggccggcccgacgcctggggcttctccccgctggacgcgcagccgacgtacgtgccgatggcgcaggcgcaccaccaccacctcaacctcctcgccgcgctctccggcgccgccaggcgcgccgaggaggagtcccggtga

SEQ ID NO: 10 - protein, 211 aa, Oryza sativa
MSSRDAAATFHVYQPVQIPTATVAPAAAVSAAPAEAVAQLVPAPSKKAAGAAGGKDRHSKVNGRGRRVRMPIVCAARVFQLTRELGLKSDGQTIEWLLRQAEPSILAATGTGTTPAAFVSSSAPSTSSSHQHTLLGKRQRQESAAADAVSVAGAASAFWAALPAPGRPDAWGFSPLDAQPTYVPMAQAHHHHLNLLAALSGAARRAEEESR

SEQ ID NO: 11 - DNA, 621 bp, Oryza sativa
atggcctcccgcgacgccgccaccttccaggtctaccggcccatggcaatgccaacgccggcggcgctgccaccgtcgtcccagcagatcacaatgccgttcacggcggcgctcgtggacgccgtgctcccagctccccgaaaggcggcggcgacgcagggcggcaaggaccggcacagcaaggtgaacgggcgcggccggcgcgtgcgcatgccgatcgtctgcgcggcgcgcgtgttccagctcacccgcgagctggggctcaagtccgacggccagaccatcgagtggctgctccggcaggccgagccgtccatcctcgccgccaccggctccggcaccaccccggccgtcttctcctgctcgtccgccccctccaccgcctcctcctccttcctcctcggcaagcgcccgcgccaggaggaccacgaggcgccgacgttctgggaggcgctgcagcaacagccgcggcccgccgtgtcgtcgtggggtgccctcgtctcgccgtcgcaggaggcgcaggcgtacgcgtcgtcggtggcgcaggtccaccacctcaacctactctccgcgctctccggcgccgccacgagacggccagcacaggaggagtcccggtga

SEQ ID NO: 12 - protein, 206 aa, Oryza sativa
MASRDAATFQVYRPMAMPTPAALPPSSQQITMPFTAALVDAVLPAPRKAAATQGGKDRHSKVNGRGRRVRMPIVCAARVFQLTRELGLKSDGQTIEWLLRQAEPSILAATGSGTTPAVFSCSSAPSTASSSFLLGKRPRQEDHEAPTFWEALQQQPRPAVSSWGALVSPSQEAQAYASSVAQVHHLNLLSALSGAATRRPAQEESR

SEQ ID NO: 13 - DNA, 810 bp, Populus trichocarpa
atgtcagacaacagtggcgctgtaaataacggatctttgatagacccacaaagaaaccagccacctggaggtggtggtggaggaggaggagttactaatggagctttagttgctaaaaaaccaccttctaaagaccgtcatagcaaagttgatggtcgtggaaggaggattcggatgccgatcatttgtgctgctagagtttttcagttgactcgtgaattgggtcataaatccgatggacaaactattgaatggctacttcgtcaagctgagccttcgattattgctgctactggtactggaactactcctgctagtttttctactgtttctgtttcggttcgtgctggtgggaattcaaattctatatcttctctttcgagcaataatattcatccggttggttctttggagcacaagcctttgttaggcccagcgccgtttatacttgggaaaaggatgcggccggaggaggatggtaatggtggtgggaaggacgatgatggggttcctgtgggccccacaattgggtcattaatgggccccacagcaacagccgggcctggtgggttctgggctttacctgccaggcccgatttttgggggtttgctgctgctgcaccgccggaaatggttgttcagccgactgcggtgcagcagtcttcactgtttatgcaccagcatgctgcggctatgggagaagcgtcggcggcaagagtggggaattatcttcctggtcatttgaatttgctggcttctttgtcgagtggacatggaagttcaggaaggagagaggatgatcaccgttga

SEQ ID NO: 14 - protein, 269 aa, Populus trichocarpa
MSDNSGAVNNGSLIDPQRNQPPGGGGGGGGVTNGALVAKKPPSKDRHSKVDGRGRRIRMPIICAARVFQLTRELGHKSDGQTIEWLLRQAEPSIIAATGTGTTPASFSTVSVSVRAGGNSNSISSLSSNNIHPVGSLEHKPLLGPAPFILGKRMRPEEDGNGGGKDDDGVPVGPTIGSLMGPTATAGPGGFWALPARPDFWGFAAAAPPEMVVQPTAVQQSSLFMHQHAAAMGEASAARVGNYLPGHLNLLASLSSGHGSSGRREDDHR

SEQ ID NO: 15 - DNA, 594 bp, Solanum lycopersicum
atgccaattgtttgtgctgctagggtttttcagctaactcgtgaactaggtcataaatccgatggacaaacaattgaatggctgttgcgtcaagctgaaccttcgattattgctgctactggtactggtactatacctgctagtttctctactgtttcagtttcgttacgaaattcgatttcttctgttactgcttctgctccggttgatcataagttgccgtcgccgtcgccgtcgttgttacatccgttgatttctccggcgccgtttttgcttggtaagcgtttacgttctgaggatgatgataatggaagtggagataaggatgtggttcctagtgctggattttgggcagttcctgctaggccggattttggacaagtttggagtttcgctgcaccgtcgccggagatttcacattccgctgcagcagcgatgaatacgcagccatcgaggtttcttcagcagcagatggaagaggcatcagctggtagagttgggaattactttcctatagctcaagggcatctgaatttgctagcttctctatctggttcgggttctggaccgagaagggacgacgatggacaatga

SEQ ID NO: 16 - protein, 197 aa, Solanum lycopersicum
MPIVCAARVFQLTRELGHKSDGQTIEWLLRQAEPSIIAATGTGTIPASFSTVSVSLRNSISSVTASAPVDHKLPSPSPSLLHPLISPAPFLLGKRLRSEDDDNGSGDKDVVPSAGFWAVPARPDFGQVWSFAAPSPEISHSAAAAMNTQPSRFLQQQMEEASAGRVGNYFPIAQGHLNLLASLSGSGSGPRRDDDGQ

SEQ ID NO: 17 - DNA, 606 bp, Vitis vinifera
atgtctacctcagatggagcggctaacggcgttactaacggcgctattgttgactcccagaggcagcagcagcccggtaacggggccttggcggtaaagaagccgccggccaaggaccgccacagcaaagtcgacggtcggggcaggcgtatccggatgccgatcatctgcgccgccagggttttccagttgacgcgggagctggggcacaaatctgatggtcaaactatcgagtggctgctgcggcaggcggagccgtcgatcatagcggccacagggacggggaccactcctgcgagtttttcgagcccgtcgcagccgctgctcagcccgacgccgtttattctcgggaagcgtctacggggcgacgacgacgtcgacggcggggccaaagatgaggtgtggagcttcgccgctgccgcagctgctgccccgccagagatggtgccgacgatctccgggaggttcatgcagcagccgatgggagaggcgtcggcggctagagttgggaattatcttccgatcgcgcagggacatctgaatttgctggcgtcgttgtctggagctccggcatcgtcggggaggagagacgacgatccacgttga

SEQ ID NO: 18 - protein, 201 aa, Vitis vinifera
MSTSDGAANGVTNGAIVDSQRQQQPGNGALAVKKPPAKDRHSKVDGRGRRIRMPIICAARVFQLTRELGHKSDGQTIEWLLRQAEPSIIAATGTGTTPASFSSPSQPLLSPTPFILGKRLRGDDDVDGGAKDEVWSFAAAAAAAPPEMVPTISGRFMQQPMGEASAARVGNYLPIAQGHLNLLASLSGAPASSGRRDDDPR

SEQ ID NO: 19 - DNA, 1197 bp, Antirrhinum majus
  misc_feature (968)..(968): n is a, c, g, or t
atggaaggaggcgatgatcatcaccaccaccaccaccaccacaaccaaagccgcccaaacttccctttccaactactcgaaaaaaagacaaccaataatccaccctcctccgccctcgccatctccgccgacatcgcttcaaaccctagcaccaccacctccaccaccactctaactgccgcctcagccgaaacatcgaagaaaccacctccaaagcgtacatcaaccaaagaccgccacaccaaagtcgacggccgagggcgacgtatccgaatgcccgccctatgcgctgctagggtttttcagctcactcgagaactcggccacaaatctgacggcgagacaatcgagtggctgctacaacaggcagaaccctccgtcatagcagccacaggtaccggcacaattcccgctaacttcacctctctaaacatttcattacgtagctccggttcaagcatgtctgtcccatctcaactaagatcctcctacttcaatccttcgaattatacgatgatgtcgcagccgcggcgagggttttcgtttcccggtatagggttgtcatcatcagagagttcttcttcaggtaccctattgaatttccaacaggcagcggcaaatttaaaccctagcttgatgcatcaagctaagcaagaaatgcgagaaaacagtaacaataataataattcattggagtcggaggaggaaaatatggggcggaagaggagggcggagcaggagctgcagcaacaccagcatcaccagattggtaactacttggtccagtcgagtaccggaccaatggcggccagccacgcgtccataccagctaacttctggacgctggcgaattccagtaataataacaacaacaacaacaacaataataataatcaagggatggggagcgatccgatatggacgtttccatcggttaatattaacaatagcgctgctgctgctgctgntttgtacagaggaactgtttctagtgggctgcattttatgaattttccggcaccggtggcgttgttgcctagtcaacaaattggtggaaatgttttgggagaagggcagttgggtaatttcatgaacccttataggaatatcggtggaggcggaggagcgtcggagtcacaggcgagtggctcacacggtggtgatgatcggcatgatagcacaagtcaccattcttga

SEQ ID NO: 20 - protein, 398 aa, Antirrhinum majus
  misc_feature (323)..(323): Xaa can be any naturally occurring amino acid
MEGGDDHHHHHHHHNQSRPNFPFQLLEKKTTNNPPSSALAISADIASNPSTTTSTTTLTAASAETSKKPPPKRTSTKDRHTKVDGRGRRIRMPALCAARVFQLTRELGHKSDGETIEWLLQQAEPSVIAATGTGTIPANFTSLNISLRSSGSSMSVPSQLRSSYFNPSNYTMMSQPRRGFSFPGIGLSSSESSSSGTLLNFQQAAANLNPSLMHQAKQEMRENSNNNNNSLESEEENMGRKRRAEQELQQHQHHQIGNYLVQSSTGPMAASHASIPANFWTLANSSNNNNNNNNNNNNQGMGSDPIWTFPSVNINNSAAAAAXLYRGTVSSGLHFMNFPAPVALLPSQQIGGNVLGEGQLGNFMNPYRNIGGGGGASESQASGSHGGDDRHDSTSHHS

SEQ ID NO: 21 - DNA, 1470 bp, Arabidopsis thaliana
atgcaaaagccaacatcaagtatcttaaatgtcataatggacggtggagacagcgtcggaggaggaggaggagatgatcaccaccgtcacctccaccatcaccaccgccctactttcccttttcaactactcggaaaacacgaccccgacgacaaccatcaacaacaaccttccccttcctcctcctcctctctattttctctccatcaacaccaacaattatctcaatcgcaacctcaatcgcaatcgcaaaagtcacaaccgcagacaacgcaaaaagagttattacaaacgcaagaggaatctgcggtggtggcagctaaaaagccaccgttgaaacgagcgtcgacgaaagaccgacacacgaaagtagacggaagagggaggagaataaggatgccggcgttatgtgcagctagggtttttcagctaacgcgagagctaggtcataaatccgacggtgagacaatagagtggcttcttcaacaagctgaaccatctgtaatcgccgccaccggaaccggaacaatcccggcgaatttcacttctttaaacatctctctccgttcttcaggctcttccatgtctcttccttctcatttccgctccgccgcttccacttttagccctaataacatattttctccggcgatgcttcaacaacaacaacaacaacaacgtggtggtggtgttgggtttcatcatccccatctacagggacgtgcacctacgtcgtctttgtttcctggtattgataacttcacaccaacgacgtcgtttttgaactttcataatccaacaaagcaagaaggagatcaagattctgaagagttaaactcggagaagaaaagaagaatccaaacgacgtcggatttgcatcaacaacaacaacaacaccaacatgatcaaatcggaggatatacacttcaatctagcaacagtggatctacagccaccgcagccgccgcgcaacaaataccgggaaatttctggatggttgcggcggctgcggctgcaggtggtggtggtggtaataacaaccaaacaggtggtcttatgacagcttctattggtactggtggcggcggtggagagcctgtttggacgtttccttccattaacacggcagcggcagcgttatatagaagtggcgtttcgggcgttccaagcggcgcggtttctagcggtttacattttatgaatttcgcagcgccaatggcatttcttactggacaacaacagctagcaacaactagtaatcatgagattaatgaagatagtaataataatgaaggaggaagaagtgacggtggtggtgatcatcataatacacagagacatcatcatcatcaacaacaacatcatcataatattctctccggcttgaaccagtacggacggcaagtttccggcgactctcaagctagtggatcacttggaggtggtgatgaggaggatcagcaagattag

SEQ ID NO: 22 - protein, 489 aa, Arabidopsis thaliana
MQKPTSSILNVIMDGGDSVGGGGGDDHHRHLHHHHRPTFPFQLLGKHDPDDNHQQQPSPSSSSSLFSLHQHQQLSQSQPQSQSQKSQPQTTQKELLQTQEESAVVAAKKPPLKRASTKDRHTKVDGRGRRIRMPALCAARVFQLTRELGHKSDGETIEWLLQQAEPSVIAATGTGTIPANFTSLNISLRSSGSSMSLPSHFRSAASTFSPNNIFSPAMLQQQQQQQRGGGVGFHHPHLQGRAPTSSLFPGIDNFTPTTSFLNFHNPTKQEGDQDSEELNSEKKRRIQTTSDLHQQQQQHQHDQIGGYTLQSSNSGSTATAAAAQQIPGNFWMVAAAAAAGGGGGNNNQTGGLMTASIGTGGGGGEPVWTFPSINTAAAALYRSGVSGVPSGAVSSGLHFMNFAAPMAFLTGQQQLATTSNHEINEDSNNNEGGRSDGGGDHHNTQRHHHHQQQHHHNILSGLNQYGRQVSGDSQASGSLGGGDEEDQQD

SEQ ID NO: 23 - DNA, 978 bp, Arabidopsis thaliana
atggatccggatccggatcataaccatcgacccaacttccctctccagcttcttgattcttctacctcctcctcttccacttccttagccatcatctctactacttccgaacctaactccgaacctaagaagcctcctcctaaacgaacctctactaaagaccgacacaccaaagtcgaaggccgaggccgtcggatccgtatgcctgccatgtgtgctgcacgtgtctttcagctcacacgtgagcttggtcacaaatccgacggtgaaactattgagtggctactccaacaagcagaaccagcggttatagccgctacagggactggaaccattccggctaacttcacttctttaaacatctcacttcgtagctcaagatcttctctctctgctgctcatcttcgtacaactcctagtagctattactttcattcaccacatcagtccatgactcatcatcttcaacatcagcatcaggttcgtcccaagaacgagtcacattcttcgtcttcttcttcttcacagcttttagatcacaaccaaatgggtaactatctagtacaatcaactgctggatctttacctacgagtcagagtcctgcaacggcaccgttttggagtagtggtgacaacacacagaatctttgggcttttaatattaatcctcatcattccggtgttgtcgccggagatgtttacaaccccaacagtggtggtagtggcggcggtagtggagttcatttgatgaattttgcagctcctattgctttgttttctggacagcctttggcttctggttatggaggaggaggaggtggcggtggagaacatagccattatggagttttagcggcgttgaatgctgcttaccgaccggtggcggagacggggaaccataacaacaaccagcaaaaccgtgacggagatcatcatcacaaccatcaagaagatggaagcaccagtcatcattcctag

SEQ ID NO: 24 - protein, 325 aa, Arabidopsis thaliana
MDPDPDHNHRPNFPLQLLDSSTSSSSTSLAIISTTSEPNSEPKKPPPKRTSTKDRHTKVEGRGRRIRMPAMCAARVFQLTRELGHKSDGETIEWLLQQAEPAVIAATGTGTIPANFTSLNISLRSSRSSLSAAHLRTTPSSYYFHSPHQSMTHHLQHQHQVRPKNESHSSSSSSSQLLDHNQMGNYLVQSTAGSLPTSQSPATAPFWSSGDNTQNLWAFNINPHHSGVVAGDVYNPNSGGSGGGSGVHLMNFAAPIALFSGQPLASGYGGGGGGGGEHSHYGVLAALNAAYRPVAETGNHNNNQQNRDGDHHHNHQEDGSTSHHS

SEQ ID NO: 25 - DNA, 945 bp, Gossipum hirsutum
atggaaggaggaggcagtgatgatcatcaccaccaccaccacagccaccaccatcaccaccaacaaccactccaccatcatcatcatcaccaccaccgccctactttcccattccaattactagagaagaaagaagaagataaccaaccttgttcctcctcttcttcccttcctttcccttccctaccggtttcatcttcctcggccgatcaacacacctcgactcgttccatttcaacccaccagatctcgccggaaacttccaagactccaccgcctaaacgtacttcgactaaagaccgacacaccaaggtagatggacgtggtcgtaggatccgtatgccggctctttgtgcagctagggtttttcagcttactcgcgagttgggtcataaatacaatggtgaaacgatcgagtggttgctacaacaagctgagccggcggtgatcgccgctacggggactggtaccatccctgcaaacttcacttccctcaatatctcactccgtagctccggttcaagcatgtcggttccttctcagcttcgttcctcgggttttagctctaacttttctatgcaacaacgtagaagcttgttccccggaatcgggctcgaaacgacgccgacgccgacgacgttccttaacttccaatctagtagtacttcgttgggaatatcggaagaagccgaagaaagtagtttaggaaggaaacgaagacccgaacaagatttatcttcacaacatcatcagaatggggagttacttgttgcatcaagcaccgtacattccggcgagtcaccacgctcaagttccggtaacttttggatggtaactaattctaataatcaagctatgagtggtggtgaccctatatggacattccttcagttaataacagtggtttgtataggggaactatgtctagtgggttgcatttcatga

SEQ ID NO: 26 - protein, 314 aa, Gossipum hirsutum
MEGGGSDDHHHHHHSHHHHHQQPLHHHHHHHHRPTFPFQLLEKKEEDNQPCSSSSSLPFPSLPVSSSSADQHTSTRSISTHQISPETSKTPPPKRTSTKDRHTKVDGRGRRIRMPALCAARVFQLTRELGHKYNGETIEWLLQQAEPAVIAATGTGTIPANFTSLNISLRSSGSSMSVPSQLRSSGFSSNFSMQQRRSLFPGIGLETTPTPTTFLNFQSSSTSLGISEEAEESSLGRKRRPEQDLSSQHHQNGELLVASSTVHSGESPRSSSGNFWMVTNSNNQAMSGGDPIWTFLQLITVVCIGELCLVGCIS

SEQ ID NO: 27 - DNA, 1164 bp, Oryza sativa
atggatgtcaccggagacggcggaggaggagggcaacggcccaatttccccctgcagctcctcgggaagaaggaggagcagacgtgctcgacgtcgcagactgccggggcgggcggcggcggcgtcgtgggcgcgaatgggtcggcggcggcggcgccgccgaagcggacgtcgacgaaggaccggcacacgaaggtggacgggcgggggcggcgcatccggatgccggcgatctgcgccgcgcgggtgttccagctgacgcgggagctcgggcacaagaccgacggcgagaccatcgagtggctgctgcagcaggcggagccggcggtgatcgcggcgaccgggacgggcaccatcccggccaacttcacctccctcaacatctccctccgctcctccggctcgtcgctctccatcccttctcacctccgccttgccggcttggctggccctcgcttcggcggcggcgcgcgggcggcggacgcgtgggaccgcgtcgtcggcctcgggttcggcggtgcggccgacgccccgtcctccgccacctcctcctcctcgtcgccgcttctgctgagcttccactccggtagcgtcggccttgacgtgtcgccgccgtcggcgtcgacctccccggccgccgccgacctctcccggaagcggcggtgggagcaagaaatgcagcagcagcagcagtaccagcagcagatggccgggtacacgcagagccaaattcctgcgggcacggtgtggatggtgccgagcagcaacgcgcaggccgccggtggcggcgctccgccgggaggcggcggcgagtcgatttggacgttcccgcagtcagggagcggcggcggcggcggcgcggcgacagtgtaccgtggcgtgccaagcggactacatttcatgaacttcccggcgacaccaatggcgctgctccccggcgggcagcagctcggcctcgccggcgccggcgggggtggcgaggggcacccggggatcctcgccgcgctcaatgcctaccgcgcacaggccgcgcagccggacgccggcgcggcggcgcagaatggagcgcaaggctcaagtcagcatcgtcagcatcagcatcacggcggcggcggcggcggcggcgacgagcggcatgagagcatgagcgccagcgactcgtag

SEQ ID NO: 28 - protein, 387 aa, Oryza sativa
MDVTGDGGGGGQRPNFPLQLLGKKEEQTCSTSQTAGAGGGGVVGANGSAAAAPPKRTSTKDRHTKVDGRGRRIRMPAICAARVFQLTRELGHKTDGETIEWLLQQAEPAVIAATGTGTIPANFTSLNISLRSSGSSLSIPSHLRLAGLAGPRFGGGARAADAWDRVVGLGFGGAADAPSSATSSSSSPLLLSFHSGSVGLDVSPPSASTSPAAADLSRKRRWEQEMQQQQQYQQQMAGYTQSQIPAGTVWMVPSSNAQAAGGGAPPGGGGESIWTFPQSGSGGGGGAATVYRGVPSGLHFMNFPATPMALLPGGQQLGLAGAGGGGEGHPGILAALNAYRAQAAQPDAGAAAQNGAQGSSQHRQHQHHGGGGGGGDERHESMSASDS

SEQ ID NO: 29 - DNA, 1233 bp, Oryza sativa
atgaccatggacgtcgccggagacgccggaggtggccgccgcccaaacttccccttgcagcttcttgagaagaaggaggagcagccgtgctccagctcggctgcaggaggtggtactgggccatcatcggcgggtggcaacgggaacaatggatcgggaccgggcggtgccggaggggagatgcagctgcggaaggcggcgccgaagcggagctccaccaaggaccggcacaccaaggtggaagggagggggcggcgcatccggatgccggcgctgtgcgcggcgagggtgttccagctgacgcgggagctggggcacaagacggacggcgagaccatcgagtggctgctgcagcaggcggagccggcggtgatcgcggccaccggcaccggcaccatcccggccaacttcacctcgctcaatatctccctccgctcctccggatcgtcgctgtccgccccggcgcacctccgcgcgttacctagccccgccgccgccgcccggttcggatcccgtgcggacgcgtgggaccgggttgtcagcctcgggttcccgtccgagggccccgcctcgtcgtcctcgtcgccgtccccgcttctgttgaacttccactcgggcagcgtcggtctcgatgtgcaaccttcgccttccgccgctgccgccgccgccgacctctccaggaagcggcgctgggagcaggaaatgcagcagcagcaacagcaacaacagcagcagcagcagcagcagcagcaacagtaccagcagcagatggccgggtacacgcagagccaaatgccgggcaccgtgtggatggtgccgagcaacagcacgcaaggaggtgggccgtccggtggtggcggtggcggcggaggaggcagcggggagtccatttggacgttcccgcagatgagcagcgccgccgcggccgccgccgtgtaccgggggagcgttccgagcgggctacatttcatgaacttccctgcaccgatggcgctcctaccgggacagcagctggggctcggcccagttggaggcggcggtggcggtggaggaggcggggaggggcacatggggatccttgccgccctcaatgcttaccggacacaggcggcgacggatgccgccggtcagcaaggcggaggaggaggtggaggaggatctagccagcagcaacacggaggcggcggcggcggcggcgagcggcatcagagcataagcaccagcgactcgtag

SEQ ID NO: 30 - protein, 410 aa, Oryza sativa
MTMDVAGDAGGGRRPNFPLQLLEKKEEQPCSSSAAGGGTGPSSAGGNGNNGSGPGGAGGEMQLRKAAPKRSSTKDRHTKVEGRGRRIRMPALCAARVFQLTRELGHKTDGETIEWLLQQAEPAVIAATGTGTIPANFTSLNISLRSSGSSLSAPAHLRALPSPAAAARFGSRADAWDRVVSLGFPSEGPASSSSSPSPLLLNFHSGSVGLDVQPSPSAAAAAADLSRKRRWEQEMQQQQQQQQQQQQQQQQQYQQQMAGYTQSQMPGTVWMVPSNSTQGGGPSGGGGGGGGGSGESIWTFPQMSSAAAAAAVYRGSVPSGLHFMNFPAPMALLPGQQLGLGPVGGGGGGGGGGEGHMGILAALNAYRTQAATDAAGQQGGGGGGGGSSQQQHGGGGGGGERHQSISTSDS

SEQ ID NO: 31 - DNA, 1188 bp, Populus trichocarpa
atggaaggaggtgatgatcagttccaccatcagcaccatcaccagcatcaccaccgcccaaccttcccattccaattgctggaaaagaaagaagacgagccttgctcttcctcttctccttacccttctcttcccatctccactaccgaacctaacagcaacagcaacagtacgaacacaaatcactctacctcgaatctccaaattgaggttgctgaaccatcaaagaaaccccctccaaaacgaacatcaacaaaagacagacacacgaaggtggatggacgtggtcgtagaattcgcatgccagctctctgcgctgctagggtttttcagctcactcgagagcttggccacaaatcagatggtgaaaccatcgagtggttacttcaacaagctgaaccagcagtgatcgctgccacaggcacgggcacaatccctgctaatttcacttcactcaacatatccttgcgtagctctggttcaagtatgtcaattccttctcacctaagatcagggagtttcaatccaaacttttcactgcagcaacgtagtcggagtttgttccccggaattgggctagaaacctcacaaccaccgacattcctaagtttccaatctagtaacaatctgaatgcagtgctgcaagcgaagcaagaattgcgagacaattcttcactggaattatcaacggagacggaagagagtttaagcaggaaacgaaggtccgagcaagatttatcaccatcgcaacagcatcagatggggaattacttgttacaatccagtgcaggggcaatcccagctagtcatggtcaaattccagcaaatttttggatgctggctaattccaataacaatcaagtcatgagcggagaccctatatggacatttccttctgtcaacaacagtagtgtgtacagaggcagcatgtcaagtgggttgcattttatgaattttcctgctcctgttaccttattgcctagccagcaactggggtctactagcattggtggtgccagtggtggtaatagtgggataagtgaagggcatttgaacatgctagctggattgaatccctaccgaccttcaggtctatcagaatcacaggcgagtgggtctcactcacatcatggtggcggtggtggaggaagcgatgatcggcatgatacaacgagtcatcactcatag

SEQ ID NO: 32 - protein, 395 aa, Populus trichocarpa
MEGGDDQFHHQHHHQHHHRPTFPFQLLEKKEDEPCSSSSPYPSLPISTTEPNSNSNSTNTNHSTSNLQIEVAEPSKKPPPKRTSTKDRHTKVDGRGRRIRMPALCAARVFQLTRELGHKSDGETIEWLLQQAEPAVIAATGTGTIPANFTSLNISLRSSGSSMSIPSHLRSGSFNPNFSLQQRSRSLFPGIGLETSQPPTFLSFQSSNNLNAVLQAKQELRDNSSLELSTETEESLSRKRRSEQDLSPSQQHQMGNYLLQSSAGAIPASHGQIPANFWMLANSNNNQVMSGDPIWTFPSVNNSSVYRGSMSSGLHFMNFPAPVTLLPSQQLGSTSIGGASGGNSGISEGHLNMLAGLNPYRPSGLSESQASGSHSHHGGGGGGSDDRHDTTSHHS

SEQ ID NO: 33 - DNA, 960 bp, Solanum demissum
atgactacctctagtagtgatgcaccttgtgttgatcataaccaaaaatcaaaaaatcaagacaagaaacaacaagcaaaaaaaccaacaacaacaaaagatagacacacaaaggttgatggtcgtggtcgaagaattcgtatgccagcaacatgtgcagctagggtttttcaactcactagagaattaggtcacaaatctgatggtgaaactattgaatggctcttacaacaagctgaacctgctgttattgctgctactggtactggtactattccagctaattattcatcacttaatatttctttaagaagttctagacatcatagtgctagtaactacctagcacataataatattaataatttcggtcatgtttatcatgaccgaaattattttaatggggttggtttattttcgtccgaaaataattcatttttccctagtgggaatttgaacatgttacaagcgaaggaggagttatgtgatgacgatgataatgataatgataataataataatactggacgaattaagcggaggtcagaagataaagacttacaacacaataattaccatatgagtaatatgttacaatctagtacttatggttcaattccagcaagtcatcaaattgggcatattccagcaacaacgttatatatgatgacaaataataataataatactagtcatcatgaccctaataattgttctatgtgggcatctcctagtaatagtaatattgagaattcaaatattagaggagggttattgaattttatgaattttcatcaaccaattttggggacacgtggcggtggcggcggtgggacggcggcagaagggcaatgggggatgttgacggcggcgatgaactcgtatagacaaagtggtggtcatgctagtggttcttctaatcagcataatggaggagatgatcatcaacatcattcttga

SEQ ID NO: 34 - protein, 319 aa, Solanum demissum
MTTSSSDAPCVDHNQKSKNQDKKQQAKKPTTTKDRHTKVDGRGRRIRMPATCAARVFQLTRELGHKSDGETIEWLLQQAEPAVIAATGTGTIPANYSSLNISLRSSRHHSASNYLAHNNINNFGHVYHDRNYFNGVGLFSSENNSFFPSGNLNMLQAKEELCDDDDNDNDNNNNTGRIKRRSEDKDLQHNNYHMSNMLQSSTYGSIPASHQIGHIPATTLYMMTNNNNNTSHHDPNNCSMWASPSNSNIENSNIRGGLLNFMNFHQPILGTRGGGGGGTAAEGQWGMLTAAMNSYRQSGGHASGSSNQHNGGDDHQHHS

SEQ ID NO: 35 - DNA, 933 bp, Vitis vinifera
atgatcatggagggagaaaatggaatccgccgccctaattttccattacaattactagagaaaaacaaggatgaagtagcatccactgcatccaattcaggtccacagatctcggagcctcccaagaagcctccacctaaaaggacctccaccaaggataggcatactaaggtcgatgggagggggcgccgcatccgcatgcctgccacctgcgccgctagggtgtttcagttgactagggaattaggccacaagtccgacggcgagaccatcgagtggttgttacaacaggcggagcccgcagtcatcgctgccaccggaaccggtacaattcccgccaattttacttcactgaatatctctcttcggagctccggttctagcatgtctgcaccttcccacctgaggactagctactataatcccaactttgccaggaaccggaccgaatgggaaaggaatatcgatgaatctttgcgcagaattgcaaccatagggagaaagaggcagccagagcaggatccgtcccatagtcagatggggaactacttgttgcagtcgggttcggggtctatcccgtccactcatagtcagattccgaccacgttttggatggtgactaatccaagtaaccaagtgatgagtggggatcccgtgtggacatttccttctgttaataacagctccatgtatagagggaccatgtcaagtgggctacattttatgaattttcctactccaatggctctcttgcctgggcagcagttgggttcaggaattggtggaagtgggggcgtggccgatggccacttgggcatgttagccgctctcaatgcgtttaggccgcttcctggcaacggggcaccggactcgcagcagactgcttcacatccccacaacggaggagaccatagacatgatacaactagctag

SEQ ID NO: 36 - protein, 310 aa, Vitis vinifera
MIMEGENGIRRPNFPLQLLEKNKDEVASTASNSGPQISEPPKKPPPKRTSTKDRHTKVDGRGRRIRMPATCAARVFQLTRELGHKSDGETIEWLLQQAEPAVIAATGTGTIPANFTSLNISLRSSGSSMSAPSHLRTSYYNPNFARNRTEWERNIDESLRRIATIGRKRQPEQDPSHSQMGNYLLQSGSGSIPSTHSQIPTTFWMVTNPSNQVMSGDPVWTFPSVNNSSMYRGTMSSGLHFMNFPTPMALLPGQQLGSGIGGSGGVADGHLGMLAALNAFRPLPGNGAPDSQQTASHPHNGGDHRHDTTS

SEQ ID NO: 37 - DNA, 1080 bp, Vitis vinifera
atgatggaaggaggtgatgagctccacaggccaaattttccattccaattgctagaaaagaaggaagaagaagcgtgctccagctctgaacccaacaccaaccgctctaattcatctctacaaatcgcagcggagccttccaaaaagccgcctcccaagaggacttccaccaaggatcggcacaccaaagtcgacggacgtggccgccgcatccgcatgcctgcactctgcgctgctagggtttttcagctaacgcgtgagctcggccataaatccgacggcgaaaccatcgagtggctgcttcaacaggccgagcctgccgtgattgccgccaccggaaccggcacaattcctgcaaattttacgtcccttaacatctccctccggagctcgggctcaagcatgtccgtcccatctcaactaagatccacttacttcaatcccaacttctcggtccctcaaagaagaagtctttttccggggctatcatcggagaattcttccacactcgttaatttccaatctaacaatctaaattccatgtttcaagccaagcaagagttgagagacacttcactagacctatcggagactgaggagagcatagggaggaagaggcggccggagcaggatttgtcgcaacaacaaatgggaagctacttgctgcagtcgagcaccggctccatcccggccagccatggtcagattccggcgaatttttggatgctcactaattctaataaccaagtcatgagtgctgaccctatatggccatttccttctgttaataacagtaacttatataggggcactatgtccagtgggctacattttatgaattttccgactcctgttgccctcttgcctagccagcagttgagctccggcggtggaggtggcagtggtggtggcggtggtggcggcggcagtggcatgggcgagggtcactttaacatgctggctggactaaacccttatcggccggtgatggggagtggagtgtcggaatctcaggcaagtgggtctcagtcgcaccatggaggtgatgatcgacatgatgcaaccagtcaccactcatag

SEQ ID NO: 38 - protein, 359 aa, Vitis vinifera
MMEGGDELHRPNFPFQLLEKKEEEACSSSEPNTNRSNSSLQIAAEPSKKPPPKRTSTKDRHTKVDGRGRRIRMPALCAARVFQLTRELGHKSDGETIEWLLQQAEPAVIAATGTGTIPANFTSLNISLRSSGSSMSVPSQLRSTYFNPNFSVPQRRSLFPGLSSENSSTLVNFQSNNLNSMFQAKQELRDTSLDLSETEESIGRKRRPEQDLSQQQMGSYLLQSSTGSIPASHGQIPANFWMLTNSNNQVMSADPIWPFPSVNNSNLYRGTMSSGLHFMNFPTPVALLPSQQLSSGGGGGSGGGGGGGGSGMGEGHFNMLAGLNPYRPVMGSGVSESQASGSQSHHGGDDRHDATSHHS

SEQ ID NO: 39 - DNA, 56 bp, Artificial Sequence
  Primer
ggggacaagtttgtacaaaaaagcaggcttaaacaatgtctaaccacaaggaaaca

SEQ ID NO: 40 - DNA, 51 bp, Artificial Sequence
  Primer
ggggaccactttgtacaagaaagctgggtgaataaagtacaaaacaccgaa

SEQ ID NO: 41 - DNA, 56 bp, Artificial Sequence
  Primer
ggggacaagtttgtacaaaaaagcaggcttaaacaatggaattggaaggtgatcat

SEQ ID NO: 42 - DNA, 54 bp, Artificial Sequence
  Primer
ggggaccactttgtacaagaaagctgggttcagatcatacacttctaattgctt

SEQ ID NO: 43 - DNA, 2192 bp, Arabidopsis thaliana
atcggttctagctgctaactttttatttgttgttgcctttcattgaaaaaaaaaaaactcataatacaaagacgagccatctctgattagatctacacttctcctcgcaccaaaattttgccagttttcgttcctttgttcataacattttcgcggattccaaatggatttcatgaaggtcttcgatcaaactgttcgagagataaaaagggaggtgaatctgaaagttttgaaggtccctgagatggagcaaaaggtattggatgctacagataatgagccttggggtccccatggtactgcattggcagagatagctcaggccacgaagaaattctcggagtgccagatggttatgagtgttttgtggactagactaagtgagacaggaaaagattggcgatatgtctacaaggcattggctgttattgattatctgatttcgaatggatcagaacgagcggttgatgagattattgagcatacttaccaaatatcttcactcacaagttttgagtatgttgaaccaaatgggaaagatgtgggaatcaacgtgagaaagaaggcggaaaacatagtcgctcttttaaataataaagagaaaatctcagaaatcagagacaaagcagtagcaaatcgtaacaagtatgttggcctctcatcaacgggaataacatataaatctggttcctcagcttcatttggtggtagttttcaaagtggttcaagcaattttgacagctacaaggatagagattccagagaagacaagaatgactacgagtcttttcaaaagtcaagacgtggtgttaaaactgaggagcaaagctacacttctaagaagagtttttcacgctatggcagcacggaccatgacaatctatccagtggtaaaaagtcacccgattctgccaaacataggtcatatgtatctgcagctccttcaaacaacgatgatgattttgatgattttgatccacggggaacttccagtaataagccatccacaggcagtgccaaccaagtggacctttttggaggagatctgattggtgacttcttggattctgggccaacagaaacatcttccaccaacaacaacgagaactttcaagaggcggacttgtttgctgatgcagcttttgtatcagcctcggctcagggagctgaatttgggtcacagacacagaaacaagttgatcttttctctgcgtctgaaccttctgtcacagtttcttcagctcctccgacggttgatctctttgcatcttctgaatcagttgtaagcccagaagccaagatatcaatacctgagtctatggctactcccaacattgttgacccatttgctgcagttcctatggataattttgatggatcagatccttttggtgccttcacttcccactcggcttcagtttctacaggtccacaagctccaagtgtacatgggagtgcaacaaacaccacaagcccgctgtctttcgcagactcgaagccacaacatttgcaaaagaaagatcctttccaggtgaaatcaggaatttgggcagattcgctgagccgtggactgattgatctcaatataactgctcccaaaaaagcttctctagctgatgtgggtgttgtgggggatctgagcaatgaagatgggaacaaagcatctgctgcatcgtactactcaggctggtccatgggtgcaggatccgggcttggtaaaactggcctatacagtacacagcagcagcagcaacaacaacaacaacaacaagcacctgatatctcagacgatttcttctccagcctcagtaaccaaaggtaccaatctggtggctttaagcagtgaaattgtctgtgatttggtgttgagatgaaaaggcatatcaagtttgattctacattccatactggaaatgtaagtttttttaatgggtttgttgttcttgcacttcattcatgggacaatctggtcggtgactgatgtgccattgttgttgtggcgtttactttgggtttaaatgagagagagaagaattgtctttatgttttttttgataagagagtacttttattattggtttaaagtttcgatttgttcatagaacaaaagtatatgtatctcttcccactcaacaaatattttttttatcgcgtgtgattcttaatccgaaagagactccaactttcttctc

SEQ ID NO: 44 - protein, 560 aa, Arabidopsis thaliana
MDFMKVFDQTVREIKREVNLKVLKVPEMEQKVLDATDNEPWGPHGTALAEIAQATKKFSECQMVMSVLWTRLSETGKDWRYVYKALAVIDYLISNGSERAVDEIIEHTYQISSLTSFEYVEPNGKDVGINVRKKAENIVALLNNKEKISEIRDKAVANRNKYVGLSSTGITYKSGSSASFGGSFQSGSSNFDSYKDRDSREDKNDYESFQKSRRGVKTEEQSYTSKKSFSRYGSTDHDNLSSGKKSPDSAKHRSYVSAAPSNNDDDFDDFDPRGTSSNKPSTGSANQVDLFGGDLIGDFLDSGPTETSSTNNNENFQEADLFADAAFVSASAQGAEFGSQTQKQVDLFSASEPSVTVSSAPPTVDLFASSESVVSPEAKISIPESMATPNIVDPFAAVPMDNFDGSDPFGAFTSHSASVSTGPQAPSVHGSATNTTSPLSFADSKPQHLQKKDPFQVKSGIWADSLSRGLIDLNITAPKKASLADVGVVGDLSNEDGNKASAASYYSGWSMGAGSGLGKTGLYSTQQQQQQQQQQQAPDISDDFFSSLSNQRYQSGGFKQ

SEQ ID NO: 45 - DNA, 2194 bp, Oryza sativa
aatccgaaaagtttctgcaccgttttcaccccctaactaacaatatagggaacgtgtgctaaatataaaatgagaccttatatatgtagcgctgataactagaactatgcaagaaaaactcatccacctactttagtggcaatcgggctaaataaaaaagagtcgctacactagtttcgttttccttagtaattaagtgggaaaatgaaatcattattgcttagaatatacgttcacatctctgtcatgaagttaaattattcgaggtagccataattgtcatcaaactcttcttgaataaaaaaatctttctagctgaactcaatgggtaaagagagagattttttttaaaaaaatagaatgaagatattctgaacgtattggcaaagatttaaacatataattatataattttatagtttgtgcattcgtcatatcgcacatcattaaggacatgtcttactccatcccaatttttatttagtaattaaagacaattgacttatttttattatttatcttttttcgattagatgcaaggtacttacgcacacactttgtgctcatgtgcatgtgtgagtgcacctcctcaatacacgttcaactagcaacacatctctaatatcactcgcctatttaatacatttaggtagcaatatctgaattcaagcactccaccatcaccagaccacttttaataatatctaaaatacaaaaaataattttacagaatagcatgaaaagtatgaaacgaactatttaggtttttcacatacaaaaaaaaaaagaattttgctcgtgcgcgagcgccaatctcccatattgggcacacaggcaacaacagagtggctgcccacagaacaacccacaaaaaacgatgatctaacggaggacagcaagtccgcaacaaccttttaacagcaggctttgcggccaggagagaggaggagaggcaaagaaaaccaagcatcctccttctcccatctataaattcctccccccttttcccctctctatataggaggcatccaagccaagaagagggagagcaccaaggacacgcgactagcagaagccgagcgaccgccttctcgatccatatcttccggtcgagttcttggtcgatctcttccctcctccacctcctcctcacagggtatgtgcctcccttcggttgttcttggatttattgttctaggttgtgtagtacgggcgttgatgttaggaaaggggatctgtatctgtgatgattcctgttcttggatttgggatagaggggttcttgatgttgcatgttatcggttcggtttgattagtagtatggttttcaatcgtctggagagctctatggaaatgaaatggtttagggatcggaatcttgcgattttgtgagtaccttttgtttgaggtaaaatcagagcaccggtgattttgcttggtgtaataaagtacggttgtttggtcctcgattctggtagtgatgcttctcgatttgacgaagctatcctttgtttattccctattgaacaaaaataatccaactttgaagacggtcccgttgatgagattgaatgattgattcttaagcctgtccaaaatttcgcagctggcttgtttagatacagtagtccccatcacgaaattcatggaaacagttataatcctcaggaacaggggattccctgttcttccgatttgctttagtcccagaattttttttcccaaatatcttaaaaagtcactttctggttcagttcaatgaattgattgctacaaataatgcttttatagcgttatcctagctgtagttcagttaataggtaatacccctatagtttagtcaggagaagaacttatccgatttctgatctccatttttaattatatgaaatgaactgtagcataagcagtattcatttggattattttttttattagctctcaccccttcattattctgagctgaaagtctggcatgaactgtcctcaattttgttttcaaattcacatcgattatctatgcattatcctcttgtatctacctgtagaagtttctttttggttattccttgactgcttgattacagaaagaaatttatgaagctgtaatcgggatagttatactgcttgttcttatgattcatttcctttgtgcagttcttggtgtagcttgccactttcaccagcaaagttc

SEQ ID NO: 46 - DNA, 56 bp, Artificial sequence
  Primer prm09481
ggggacaagtttgtacaaaaaagcaggcttaaacaatggatttcatgaaggtcttc

SEQ ID NO: 47 - DNA, 50 bp, Artificial sequence
  Primer: prm09482
ggggaccactttgtacaagaaagctgggttcacagacaatttcactgctt

SEQ ID NO: 48 - protein, 15 aa, Artificial sequence
  Motif 1 of Epsin-like polypeptide
  VARIANT (1)..(1): Xaa can be Val or Ile
  VARIANT (2)..(2): Xaa can be Leu or Arg
  VARIANT (3)..(3): Xaa can be Asp or Glu
  VARIANT (6)..(6): Xaa can be Ser or Asp or Asn
  VARIANT (7)..(7): Xaa can be Asn or Asp or Glu or Ser
  VARIANT (9)..(9): Xaa can be Pro or Ser
  VARIANT (15)..(15): Xaa can be Thr or Ser or Glu
XXXATXXEXWGPHGX

SEQ ID NO: 49 - protein, 16 aa, Artificial sequence
  Motif 2 of Epsin-like polypeptide
  VARIANT (2)..(2): Xaa can be Gln or Glu
  VARIANT (3)..(3): Xaa can be Tyr or Phe
  VARIANT (4)..(4): Xaa can be Ile or Leu or Val or Arg or Lys
  VARIANT (5)..(5): Xaa can be Asp or Glu
  VARIANT (6)..(6): Xaa can be Ser or Pro or Ala
  VARIANT (7)..(7): Xaa can be Ser or Gly or Asn or Gln or Arg
  VARIANT (9)..(9): Xaa can be Arg or Lys
  VARIANT (11)..(11): Xaa can be Gln or Val or Ala or His or Glu
  VARIANT (13)..(13): Xaa can be Ser or Asn or Leu or Ile or Val
FXXXXXXGXDXGXNVR

SEQ ID NO: 50 - protein, 12 aa, Artificial sequence
  Motif 3 of Epsin-like polypeptide
  VARIANT (1)..(1): Xaa can Glu or Ser or Ala or Gln
  VARIANT (2)..(2): Xaa can be Val or Ile or Glu or Ala
  VARIANT (4)..(4): Xaa can be Gln or Glu or Asp or Asn
  VARIANT (7)..(7): Xaa can be Ala or Leu or Val or Glu
  VARIANT (8)..(8): Xaa can be Ala or Val or Ser or Arg or Lys
  VARIANT (9)..(9): Xaa can be Asn or Thr
  VARIANT (10)..(10): Xaa can be Arg or Ala
  VARIANT (11)..(11): Xaa can be Asp or Glu or Asn or Gly
XXRXKAXXXXXK

SEQ ID NO: 51 - protein, 10 aa, Artificial sequence
  Motif 4 of Epsin-like polypeptide
  VARIANT (4)..(4): Xaa can be Thr or Ser
  VARIANT (10)..(10): Xaa can be Val or Ile
WADXLSRGLX

SEQ ID NO: 52 - protein, 9 aa, Artificial sequence
  Motif 5 of Epsin-like polypeptide
  VARIANT (2)..(2): Xaa can be Ala or Ser
  VARIANT (4)..(4): Xaa can be Ile or Val
  VARIANT (6)..(6): Xaa can be Ile or Val
  VARIANT (7)..(7): Xaa can be Asp or Val
  VARIANT (8)..(8): Phe or Gly
  VARIANT (9)..(9): Xaa can be Asp or Glu or Pro or Gly
LXDXGXXXX

SEQ ID NO: 53 - protein, 4 aa, Artificial sequence
  Motif 6a of Epsin-like polypeptide
GGYG

SEQ ID NO: 54 - protein, 4 aa, Artificial sequence
  Motif 6b of Epsin-like polypeptide
GSYG

SEQ ID NO: 55 - protein, 4 aa, Artificial sequence
  Motif 6c of Epsin-like polypeptide
GGYD

SEQ ID NO: 56 - protein, 4 aa, Artificial sequence
  Motif 7a of Epsin-like polypeptide
SAAS

SEQ ID NO: 57 - protein, 4 aa, Artificial sequence
  Motif 7b of Epsin-like polypeptide
SSAS

SEQ ID NO: 58 - protein, 4 aa, Artificial sequence
  Motif 7c of Epsin-like polypeptide
SSAP

SEQ ID NO: 59 - protein, 4 aa, Artificial sequence
  Motif 7d of Epsin-like polypeptide
SSAT

SEQ ID NO: 60 - protein, 4 aa, Artificial sequence
  Motif 8a of Epsin-like polypeptide
DEFD

SEQ ID NO: 61 - protein, 4 aa, Artificial sequence
  Motif 8b of Epsin-like polypeptide
DFFD

SEQ ID NO: 62 - protein, 4 aa, Artificial sequence
  Motif 8c of Epsin-like polypeptide
DDDF

SEQ ID NO: 63 - protein, 4 aa, Artificial sequence
  Motif  8d of Epsin-like polypeptide
EDDF

SEQ ID NO: 64 - protein, 4 aa, Artificial sequence
  Motif 8e of Epsin-like polypeptide
DDFD

SEQ ID NO: 65 - DNA, 1734 bp, Arabidopsis thaliana
atggatttcatgaaggtcttcgatcaaactgttcgagagataaaaagggaggtgaatctgaaagttttgaaggtccctgagatggagcaaaaggtattggatgctacagataatgagccttggggtccccatggtactgcattggcagagatagctcaggccacgaagaaattctcggagtgccagatggttatgagtgttttgtggactagactaagtgagacaggaaaagattggcgatatgtctacaaggcattggctgttattgattatctgatttcgaatggatcagaacgagcggttgatgagattattgagcatacttaccaaatatcttcactcacaagttttgagtatgttgaaccaaatgggaaagatgtgggaatcaacgtgagaaagaaggcggaaaacatagtcgctcttttaaataataaagagaaaatctcagaaatcagagacaaagcagtagcaaatcgtaacaagtatgttggcctctcatcaacgggaataacatataaatctggttcctcagcttcatttggtggtagttttcaaagtggttcaagcaattttgacagctacaaggatagagattccagagaagacaagaatgactacgagtcttttcaaaagtcaagacgtggtgttaaaactgaggagcaaagctacacttctaagaagagtttttcacgctatggcagcacggaccatgacaatctatccagtggtaaaaagtcacccgattctgccaaacataggtcatatgtatctgcagctccttcaaacaacgatgatgattttgatgattttgatccacggggaacttccagtaatagtatgtttctctctacgactgctgagtttgcagattgtttatcattcattcgggagaaagttggcagtgccaaccaagtggacctttttggaggagatctgattggtgacttcttggattctgggccaacagaaacatcttccaccaacaacaacgagaactttcaagaggcggacttgtttgctgatgcagcttttgtatcagcctcggctcagggagctgaatttgggtcacagacacagaaacaagttgatcttttctctgcgtctgaaccttctgtcacagtttcttcagctcctccgacggttgatctctttgcatcttctgaatcagttgtaagcccagaagccaagatatcaatacctgagtctatggctactcccaacattgttgacccatttgctgcagttcctatggataattttgatggatcagatccttttggtgccttcacttcccactcggcttcagtttctacaggtccacaagctccaagtgtacatgggagtgcaacaaacaccacaagcccgctgtctttcgcagactcgaagccacaacatttgcaaaagaaagatcctttccaggtgaaatcaggaatttgggcagattcgctgagccgtggactgattgatctcaatataactgctcccaaaaaagcttctctagctgatgtgggtgttgtgggggatctgagcaatgaagatgggaacaaagcatctgctgcatcgtactactcaggctggtccatgggtgcaggatccgggcttggtaaaactggcctatacagtacacagcagcagcagcaacaacaacaacaacaacaagcacctgatatctcagacgatttcttctccagcctcagtaaccaaaggtaccaatctggtggctttaagcagtga

SEQ ID NO: 66 - protein, 577 aa, Arabidopsis thaliana
MDFMKVFDQTVREIKREVNLKVLKVPEMEQKVLDATDNEPWGPHGTALAEIAQATKKFSECQMVMSVLWTRLSETGKDWRYVYKALAVIDYLISNGSERAVDEIIEHTYQISSLTSFEYVEPNGKDVGINVRKKAENIVALLNNKEKISEIRDKAVANRNKYVGLSSTGITYKSGSSASFGGSFQSGSSNFDSYKDRDSREDKNDYESFQKSRRGVKTEEQSYTSKKSFSRYGSTDHDNLSSGKKSPDSAKHRSYVSAAPSNNDDDFDDFDPRGTSSNSMFLSTTAEFADCLSFIREKVGSANQVDLFGGDLIGDFLDSGPTETSSTNNNENFQEADLFADAAFVSASAQGAEFGSQTQKQVDLFSASEPSVTVSSAPPTVDLFASSESVVSPEAKISIPESMATPNIVDPFAAVPMDNFDGSDPFGAFTSHSASVSTGPQAPSVHGSATNTTSPLSFADSKPQHLQKKDPFQVKSGIWADSLSRGLIDLNITAPKKASLADVGVVGDLSNEDGNKASAASYYSGWSMGAGSGLGKTGLYSTQQQQQQQQQQQAPDISDDFFSSLSNQRYQSGGFKQ

SEQ ID NO: 67 - DNA, 1686 bp, Vitis vinifera
atggatttcatgaaagtcttcgatcagacggtccgagaaataaagagggaggtgaatctgaaggttttgaaggttccagagatcgagcagaaggtactggatgcaaccgacaatgaaccttggggccctcatggctctgccctggcagaaatagctcaggccactaaaaaattcactgaatgtcagatggttatgaatgttctgtggacaagattaagtgattctggccgagactggcgccatgtctataagtcactggctgttatagagtatttggtggctaatggatctgaacgtgctgttgatgatataattgaacacactttccaaatctcatcactttcaggatttgagtatgttgaaccaaatgggaaggatgttggaatcaatgtgaggaagaaggctgaaaccattgtggctcttttgaataacaaagaaaaaatacaagaagttagaaataaagctgctgcaaaccgcgacaagttctttggactttcctcatctggagtgacatacaagtctagttcagccccatatggcagcagcagctttcagagtgctgatcagcatggaggtatgaaaaatgattcatttagggatagttataaagacagggatcggtttgatgaagaaaaggtcgacgaggatacttctgctaagtcacgtcaaggggttaccagtgagaatgaagggaacacctttaaaaagggatctgcacgctatagcagcaaggataaagatactttgtcaacaaaggcaaattactctgacaagtacgggtcaattccctcccacagttcaagtgtgccttcaattaatgatgaagatgattttgatgactttgatccccggggaacttccagtaccaagaccactgctggaaacattaaccaaccagacctgtttgggcaaagtttgattggtgacctcatggatgcaccggcacctgttcccacagaaatgtctgccatcaacagcaattctgcagagcctgatctgtttgcagatgcaacttttgtttcagcgccacctcatgtagaagaaggttctagttctcaggttgaggcgaaggttgatctatttgggtctcaacctgctggtccttctgcgaatcctccagcatttgacttttttgctgcccctgatccagttgtgcaatcagaaaccaagtctcaaaaatctgacacagccagccccgacattgttgatccatttgctgcagttccactaaacagttttgatggatcagatctttttggttcattcacttcccataccaactctgcatctacagagcctacacaaagtcctgcaaatgatggcaaccttaacaatttgaatggaaaatcctctgcagaatttcaacctccacccaagaaggatgctttccaggttaaatctggaatttgggcagattcactgagccgtggactgattgatcttaatatatccgcacccaagaagataaatctagcagatgttggcattgtgggaggattgagtgatggatcggatgaaagggagaagggaccccaaacttcgttttccatgggacaagccatgggtattggctccggtcttggtaaatctgggtttacatctccaccaacaggtggagttggtggagatgacatcttctcaagtctcggcagccagcaataccaattcggaggcttcaagaaataa

SEQ ID NO: 68 - protein, 561 aa, Vitis vinifera
MDFMKVFDQTVREIKREVNLKVLKVPEIEQKVLDATDNEPWGPHGSALAEIAQATKKFTECQMVMNVLWTRLSDSGRDWRHVYKSLAVIEYLVANGSERAVDDIIEHTFQISSLSGFEYVEPNGKDVGINVRKKAETIVALLNNKEKIQEVRNKAAANRDKFFGLSSSGVTYKSSSAPYGSSSFQSADQHGGMKNDSFRDSYKDRDRFDEEKVDEDTSAKSRQGVTSENEGNTFKKGSARYSSKDKDTLSTKANYSDKYGSIPSHSSSVPSINDEDDFDDFDPRGTSSTKTTAGNINQPDLFGQSLIGDLMDAPAPVPTEMSAINSNSAEPDLFADATFVSAPPHVEEGSSSQVEAKVDLFGSQPAGPSANPPAFDFFAAPDPVVQSETKSQKSDTASPDIVDPFAAVPLNSFDGSDLFGSFTSHTNSASTEPTQSPANDGNLNNLNGKSSAEFQPPPKKDAFQVKSGIWADSLSRGLIDLNISAPKKINLADVGIVGGLSDGSDEREKGPQTSFSMGQAMGIGSGLGKSGFTSPPTGGVGGDDIFSSLGSQQYQFGGFKK

SEQ ID NO: 69 - DNA, 1785 bp, Oryza sativa
atggatttcgtgaaggttttcgatcaggccgtgcgggagataaagagggaggtcaatttgaaggtgctcaaggttccagagctcgaacagaaggtacttgatgcaacaagcgatgaaccttggggccctcatggtactactctttcagagctatcacatgccaccaagaagttcgctgaatgtcagatggtaatgagtgtcctctggactaggctgtctgagcgaggctcgaaatggcgtcacgtgtataaggctttgacaattattgagtacttaatagccaatggttctgagcgggcagttgatgacattcttgatcactattcaaagatctcggttctttcaagttttgaatatgtggaacctaatggaaaagatgctggaataaatgtgagaaagaaagtcgaaactatattgggactcataaatgacaaggagaaaataaagtctgtaagagagaaagccgccagtaatcgtgacaagtatgttgggctatcatcgacagggataacatataagtcaagctctgcttcatttggtagcaactatagttctggtgaacgttatgggagttttagtggtacaagggaaggtgattcatacggtgacagttatagggataaagaacctgttaaatcctctccaagttatactggcagccagaaatctggcagcaggataaaaaaggatgtgaatagaaggaatgaggattcaccgagctccttgaagtctaatgcaaaaggcaatgaggacgattttgatgattttgatcctcgtggatcttcttcaaatggtgcagctaatacaaacaccagtggcgtggatctttttgccccaaacttattggatgatttcatcgatgtgcctgcagcagcaactcatgaaacaaacgactctgcagacgctcaggttgatctgtttgctgatgcagatttccaatcagcaataccaagtacagaaacagctgcgggttcagatgtccagggcaatgtagacctttttgcggaacagccagccttcacagcagcctttccaccacagacagggtttattccaccaccaagttctgggacatctgaagcaaatacttccacgtctaagaacacaactcctgaaccttttgatccttttggtgctattcctataaacagctttgatggatctgatccatttggtgccttcaactccgatgttggatcatctagtataccaccacccacgcagagttctgttggaaatatcagcacaccaagtcagaaccctcaagcagcatctgactttggtggctttgtgtcgagcactgtagaaacagcagctaaggacccctttgatttttcaagtagcaatcttgggaaaacacctttggcagatccaaaggctgatgcatccgattttggtgcctttgtatcgcacagtgaggaagtagccaaggatccttttgatctttctttgagtaccagctctggaaggacaaaccaagcacctctggcggctcccaagtcagataccaagaaagaaaattttcaggtcaagtctggcatatgggctgactcattgagccgtggactgattgatctgaacataactggaccaaagaaggtgaacttagccgacgttgggattgtcggtggcctcgatgacgggtctgatgataaagctctgccctcatggaccatgggtgcaggaggttccagcctaggaatgtccggaattccttcatctacacaaagtggtggcattgagagcttagctaactacaacaagtaccagtttggctttaaatga

SEQ ID NO: 70 - protein, 594 aa, Oryza sativa
MDFVKVFDQAVREIKREVNLKVLKVPELEQKVLDATSDEPWGPHGTTLSELSHATKKFAECQMVMSVLWTRLSERGSKWRHVYKALTIIEYLIANGSERAVDDILDHYSKISVLSSFEYVEPNGKDAGINVRKKVETILGLINDKEKIKSVREKAASNRDKYVGLSSTGITYKSSSASFGSNYSSGERYGSFSGTREGDSYGDSYRDKEPVKSSPSYTGSQKSGSRIKKDVNRRNEDSPSSLKSNAKGNEDDFDDFDPRGSSSNGAANTNTSGVDLFAPNLLDDFIDVPAAATHETNDSADAQVDLFADADFQSAIPSTETAAGSDVQGNVDLFAEQPAFTAAFPPQTGFIPPPSSGTSEANTSTSKNTTPEPFDPFGAIPINSFDGSDPFGAFNSDVGSSSIPPPTQSSVGNISTPSQNPQAASDFGGFVSSTVETAAKDPFDFSSSNLGKTPLADPKADASDFGAFVSHSEEVAKDPFDLSLSTSSGRTNQAPLAAPKSDTKKENFQVKSGIWADSLSRGLIDLNITGPKKVNLADVGIVGGLDDGSDDKALPSWTMGAGGSSLGMSGIPSSTQSGGIESLANYNKYQFGFK

SEQ ID NO: 71 - DNA, 1887 bp, Oryza sativa
atggatttcaggaaggtgctcgaccagaccgtccgggagataaggagggaggtaaatcttaaggtgctcaaggtgccggaaatcgagcagaaggttcttgatgccaccagcgacgagccgtgggggccgcatggttccgatttggcagatatcgccagggccaccaagagctacggtgatagcgaaattataatgaatgtgttatggcaacgcctggggaacacacttgcgaattggcgtcacgtgtataaggcgttggctgtgatcgagtaccttctagctaatggcaccgaacgtgcagctgatggcattgttgacaatagctcacgaattgcaaaactcacaagatttgagtatttggagcctaatggaaaagatgttgggctcaatgtgcgtaagaaggctgaagctgttctagcaattttggatgacagggagaagcttcaagaggtcagagagaaggctgccgttactagagacaagtattttggcttatcatcaactggaataacgcacaaatcgagcgcagcatcatttggcagtggcagctactcatctggtagccactatgggagcacaggaggttcaagggaggtgggatcattcaaggatatacacacaggcacagaatggaaaaagaacaagaaggaaacagtgtcaaactacagcagcaatagagaagggtctaaagaaattactaacagtgcaaccagttataagtcaaaaaagagtgaaaggcatggtagaagaaatcaaaattccttaacattacactcgaagttatctgcaaatattagcaccacatctgaagccccaagctcaaagaaaggggaaaatgaggatgatgatgatttcaacccacgaggattttctacatctactggaacaggtaccacaagatctaatcacctggatctctttggtccaagcttgatggatgatcttgttgattctactacatccacttcaacagcaacgccaaatgttagcacacctgctgtgccagaggttgatttatttgcagatgcagctttccaatcagccaatgctccattggaggcagcaacggtttctcacactcaggacaaaattgatttgtttgctggcagactgtcttctgctgattcatttacttcagacacagagttctcagtacgcggtagtcctaacaagtcatcggagaaaaaaatgtcttccgttgtgcatccttctacttctgcttttgatcccttcaaacaatcttttgccacctcatttccttcagattcagagttctcagttcatgatccgacaagcaaatcttctcaaggaaaaactcccacaccagaacattcaagtacagcagcttttgatccttttgctgcaattccactgaagagttttgatggatccgaatcttttggaacattttcttcgaacacagcctcaaacattactgaactgccacgggattcttctgggggtcccaaaagttctgaccatggtcctttggaggatgccaattttgatgccttcacttcacacttgggatcttccacaacaagtgcaactgagtccatgaataagcccatcaaaaagcttgggcaggactcgatgtcagcatcaaaatcagttgcaaagaaagaaacttttcaggtcaaatctggcatatgggctgactctttgagccgaggattgattgatttgaatataacttcgtcacaaaagaaggtcgatctctccgatgttgggattgtcggaccgctgagcggcggatctgaggataaaggcccgggggcgacgatgggcacagcaccaggccttgtcagttctagttttccatctaaaacagaaacatccagtggaagcggtcattttcagcaccaacagtttggaagctttaagtga

SEQ ID NO: 72 - protein, 628 aa, Oryza sativa
MDFRKVLDQTVREIRREVNLKVLKVPEIEQKVLDATSDEPWGPHGSDLADIARATKSYGDSEIIMNVLWQRLGNTLANWRHVYKALAVIEYLLANGTERAADGIVDNSSRIAKLTRFEYLEPNGKDVGLNVRKKAEAVLAILDDREKLQEVREKAAVTRDKYFGLSSTGITHKSSAASFGSGSYSSGSHYGSTGGSREVGSFKDIHTGTEWKKNKKETVSNYSSNREGSKEITNSATSYKSKKSERHGRRNQNSLTLHSKLSANISTTSEAPSSKKGENEDDDDFNPRGFSTSTGTGTTRSNHLDLFGPSLMDDLVDSTTSTSTATPNVSTPAVPEVDLFADAAFQSANAPLEAATVSHTQDKIDLFAGRLSSADSFTSDTEFSVRGSPNKSSEKKMSSVVHPSTSAFDPFKQSFATSFPSDSEFSVHDPTSKSSQGKTPTPEHSSTAAFDPFAAIPLKSFDGSESFGTFSSNTASNITELPRDSSGGPKSSDHGPLEDANFDAFTSHLGSSTTSATESMNKPIKKLGQDSMSASKSVAKKETFQVKSGIWADSLSRGLIDLNITSSQKKVDLSDVGIVGPLSGGSEDKGPGATMGTAPGLVSSSFPSKTETSSGSGHFQHQQFGSFK

SEQ ID NO: 73 - DNA, 1917 bp, Avena fatua
atggatttcatgaaggtcttcgatcagaccgtgcgagagatcaagagggaggtcaacctgaaggtgctcaaggttcccgagctcgaacagaaggtgcttgatgcaacaagtgatgaaccttggggtccacatggaagtgctctttcagacgtagcgcaggccaccaagaaatactctgagtgtcagatggtaatgggtgtcctttgggctaggcttgctgagcgagactcgaactggcgccatgtgtataaggcgctgacaattatcgagtacttgatagccaacggttctgagcgggcggttgataacatccttgatcatttttcaaagatctcggttctttcgagttttgagtttgtggaaccgaatggaaaagatgctggaataaatgtgaggaagaaagtcgaaactctagtgggcatcataaatgacaaggatagaataaaggctgtgagagataaagcagccagtaaccgtgacaagtacgttgggttatcctcaaccggatcatcatatagatcaagctcagccactgtagggagcaattacagttcaggtgaacgttatgggagttttggtggcacaagggagggtgattcgttcagcaacagttacaaggacaaagaatctgctaaaacctctgcaggtagtaatggcagcaagaaatctggcagcaagacaagaaaagatgcgaagcatgatagaagctcctcgaagccaccatctactgcaaaaagcaatgaagatgacttcgatgactttgatccccgtggatcttcttcaaatgatgcagctaacaatgcgaagactagcgaggtcgatctttttggcccaaacttgatggatgatttcatggatgagcctgcagccactccagcaacaaaaggtgttgtagaacctcaggttgatctatttggtgatgcagatttccaatcagcaaccccaagtgcagaaactgctgcgcatcaggatgtccaggacaatgttgacctttttgcgggaaatgcaacctttgcttcagcatttccatcacagacggggtttattccaccaccaagttccgggacatcttcttctgccaatagttttgtgtccaagaagacagtacctgaaccatttgatcctttcggtgatattcctttaagcagttttggaggatctgacccatttggtgacttcagttccaatgttggatcatctactgcaccgccagctgtacacaattccactggaaatatcagcacgccgagtcagaactctcaggcagcatcagactttggcgcctttgaatctaacaccggaggcgcagctaaagatccctttgatttttcttccggtggcaattttggcaaaacaaacgtaacacctttggcagctcccaaaaccgacacgtctgatttcggtgcattcgtagcaaacactgcggaacgtgctaaggacccctttgatctttcttctagcatcaacaatggaaggacaggccaaacacctctggcagctcccaagtctaacaccaagaaagaaaatctccaggtcaaatctagcatatgggccgactctttgagccgtggattgattgatctgaacataaccggaccaaagaaggtgaacttggccgacgttgggatcgtgggcggcctcggtgatgggtcagatgacaaggctcatcagccctcctggaacatgggcggcggggggatctggtctagggatgtctggaatccctccatctacacaaggcggcggcatcgagagcttggcgaactacaacaagtaccagtttggcttcaaatgagcgttcaggcgagagcgtttgtagtattctggtgctcttgttgccgggctgttaaatgcatattgatttcttttcttttgttatatacatctgttctggtgatttcattatgttacctgtaa

SEQ ID NO: 74 - protein, 638 aa, Avena fatua
MDFMKVFDQTVREIKREVNLKVLKVPELEQKVLDATSDEPWGPHGSALSDVAQATKKYSECQMVMGVLWARLAERDSNWRHVYKALTIIEYLIANGSERAVDNILDHFSKISVLSSFEFVEPNGKDAGINVRKKVETLVGIINDKDRIKAVRDKAASNRDKYVGLSSTGSSYRSSSATVGSNYSSGERYGSFGGTREGDSFSNSYKDKESAKTSAGSNGSKKSGSKTRKDAKHDRSSSKPPSTAKSNEDDFDDFDPRGSSSNDAANNAKTSEVDLFGPNLMDDFMDEPAATPATKGVVEPQVDLFGDADFQSATPSAETAAHQDVQDNVDLFAGNATFASAFPSQTGFIPPPSSGTSSSANSFVSKKTVPEPFDPFGDIPLSSFGGSDPFGDFSSNVGSSTAPPAVHNSTGNISTPSQNSQAASDFGAFESNTGGAAKDPFDFSSGGNFGKTNVTPLAAPKTDTSDFGAFVANTAERAKDPFDLSSSINNGRTGQTPLAAPKSNTKKENLQVKSSIWADSLSRGLIDLNITGPKKVNLADVGIVGGLGDGSDDKAHQPSWNMGGGGIWSRDVWNPSIYTRRRHRELGELQQVPVWLQMSVQARAFVVFWCSCCRAVKCILISFLLLYTSVLVISLCYL

SEQ ID NO: 75 - DNA, 2910 bp, Medicago truncatula
atgaagaaggtttttggtcaaactgttagggaccttaaaagagaagtgaacaagaaagtgctcaaagttcctggcattgaacagaaggttcttgatgctactagcaatgaaccatggggtcctcatggaacactgcttgcagacattgctcaggcaactagaaaccctcatgaataccagatgatcatgtcagtagtctggaaacgaattaacgacactggcaagaattggcggcatgtctacaaggctttgacagtacttgagtacttggtggcccatggttctgagagagtcatagatgagatcaaagaacattcttatcaaatatcgactttgtccgactttcaatatattgattccagtggaagagatcaaggaaacaatgtcaggaaaaaatctcagaatctcgttgtccttgtgaatgataaagaaagaatcgtagaagttagacagaaggctgctgttaatagggaaaagtttcgcaataacacaccaggaggaatgtatagacctggttcacactcaagcattggaagctatggtgatcgatatgaagaagatcgttatgcgaacagggaggaagatagaaatggctatggttatggaagagaaagagaaatgggctctagagatgatgatcggtacaatcgcgatggggatcgttatggtagagattatgaggaacgttatggtagggacggttacagagatgatgataggggaagaagtcgaagtgttgactataattatgatgatactaggagcaggaattctgatagagatcgtgatttcgatgacgatggccaacactcgtctcgaggtagcaatgctaaagttgaagaccaatcactggaagcaagacttcagcggaaactttctgagcaaaattcgggtgctcctcctagttatgaagaggctgttggtgaagctcagagccctgtgcctgaaagggatgttgaaacttcggcagaatctgctccaagaggctcgtcccctcatgcaagtgataatcctagcccagcctctgctcctactggatcttctcctgtaagcaataatccaactgaagtaactgctgctgccagtacatctgttgctgctagtactgctgcttctacccaggaaactgagcccactgatgatttctttgacccacgtggtcctacatcagctgctccaaccacctctaattttggcgaaatagatttgctcggttctttatcagactcattctcttcaaacgctctgcctcttgtgcccgctacatcaggaatttcaacccctgaagcaaacactggttcaacagcttcttttgcagcaccatcctctgggtccaataatttcaatcagtcttttgaagatccgtttggtgattcaccattcaaggctgatacttctgttgaaactgctccatctcaacaccatgcacctcagactactgaaccatcccaatcagatggttttaatgctgacatgtctaactttgggtttggggactcattttctattgtaccatactctgcatctgctcccagtgacactcaacctttctctgctaactcccagtttttgtcccaagattcggaaactgatattctagctgacattcttcctcctgcaccattacctgagattacatcacagcagaacagttcagctccttcttttggccaaccttcaccttccttttcaacttcatctggatcattttccgaaccaactggtcaacttactcttcatcaaggtttctcagctgcaaccaatcaacctgcacaaacccttccaactggtcaattttcgcagccaggcttttcagcttctaattcatctttttcagcctctaccagtccatatgcacagcaaccttttccttctcattctggtcaacctggcatgcctgggttttcgtcatctactggacattctatgcagccaccttttgcttctcaaggcggtcaatctactgcacaaacaagcggtcatacctacggtggattgtactccctggatacatctcttactccaggagctccaaacatgtattctcaatcacaaaatggatataacggatctatgaacagtgggaactacttgccacagggatcctcaacaggctttccttcacaaatgactccccaagctccaacagcacaaccggcacaaatcacaaactttccccatcatggaggatctactgcttctccctctccaactgatcaagcatcacagttcaacaaccagagcttctttggacaacaagggaatgcagctccctttagctcatcatatacccctcaagtgcctgctcccaatgcttcgccgtatgctgtttcagcggcaccaaattctttagtttctcaaccatccaaagataagtttgaaacaaaatcaacagtttgggcagacacattaagcaggggactggttaatttaaacatatctggacctaaaactaatccattagcagatattggcattgacttcgaatccattaataggaaggaaaagagaatggagaagcccactaacacacctgtaacatcaactgtaaatatgggtaaagctatgggatcaggttcaggcataggtcgtgctggcgctggtgctcttagacctaatccaaattcgatgatgggttctggtatgggcatgggtatgggaatgggcaatgctcccggtggtatgggtatgggcaatgctcccggtggtatgggtatgggaggttacggaggaggcatgaatccatccatgggtatgggtatgggtatggggggaatgggcatggggcaaggataccagatgcaacctcctaatggaatgcctcctggttccaacatgccaggtaactataataataacatgatgcgtccaggtggttatgctcaacagccatatggtggataccgatga

SEQ ID NO: 76 - protein, 969 aa, Medicago truncatula
MKKVFGQTVRDLKREVNKKVLKVPGIEQKVLDATSNEPWGPHGTLLADIAQATRNPHEYQMIMSVVWKRINDTGKNWRHVYKALTVLEYLVAHGSERVIDEIKEHSYQISTLSDFQYIDSSGRDQGNNVRKKSQNLVVLVNDKERIVEVRQKAAVNREKFRNNTPGGMYRPGSHSSIGSYGDRYEEDRYANREEDRNGYGYGREREMGSRDDDRYNRDGDRYGRDYEERYGRDGYRDDDRGRSRSVDYNYDDTRSRNSDRDRDFDDDGQHSSRGSNAKVEDQSLEARLQRKLSEQNSGAPPSYEEAVGEAQSPVPERDVETSAESAPRGSSPHASDNPSPASAPTGSSPVSNNPTEVTAAASTSVAASTAASTQETEPTDDFFDPRGPTSAAPTTSNFGEIDLLGSLSDSFSSNALPLVPATSGISTPEANTGSTASFAAPSSGSNNFNQSFEDPFGDSPFKADTSVETAPSQHHAPQTTEPSQSDGFNADMSNFGFGDSFSIVPYSASAPSDTQPFSANSQFLSQDSETDILADILPPAPLPEITSQQNSSAPSFGQPSPSFSTSSGSFSEPTGQLTLHQGFSAATNQPAQTLPTGQFSQPGFSASNSSFSASTSPYAQQPFPSHSGQPGMPGFSSSTGHSMQPPFASQGGQSTAQTSGHTYGGLYSLDTSLTPGAPNMYSQSQNGYNGSMNSGNYLPQGSSTGFPSQMTPQAPTAQPAQITNFPHHGGSTASPSPTDQASQFNNQSFFGQQGNAAPFSSSYTPQVPAPNASPYAVSAAPNSLVSQPSKDKFETKSTVWADTLSRGLVNLNISGPKTNPLADIGIDFESINRKEKRMEKPTNTPVTSTVNMGKAMGSGSGIGRAGAGALRPNPNSMMGSGMGMGMGMGNAPGGMGMGNAPGGMGMGGYGGGMNPSMGMGMGMGGMGMGQGYQMQPPNGMPPGSNMPGNYNNNMMRPGGYAQQPYGGYR

SEQ ID NO: 77 - DNA, 2688 bp, Arabidopsis thaliana
atgaagaaagtcttcggacaaactgttagagaccttaagagagaggtcaacaagaaagtgctcaaagttcctggagtagaacagaaggttctagatgctactagtaatgagccatggggtccacatggatcacttcttgctgatcttgcgcaagcttccagaaattatcatgaatatcagctgatcatggtggtcatatggaaacgccttagcgacaccggaaaaaactggcggcatgtctataaggctttgacagttttggagtacatggtaggccatggatcagaacgtgttatagacgagattagagaacgtgcatatcaaatttcgacattgtccgattttcagtatattgattccggtggtagagatcaaggaagcaatgttaggaagaaatcacagagcctggtggctttggtgaatgacaaggaaagaatagctgaagtcagacagaaggctgctgctaatagagataagtatcgcagctcagcaccaggtgggatgtataagccttcaggcggatatggggataaatatgattacggaagccgggatgaagagcgaagtagttatggaagagaaagagaatatggttacagagatgatgatagaaatagtcgtgatggagatcgtcattccagggactctgaagaccggtatgggagagatggtaatagggatgatgattacaggggaaggagcagaagtgttgataactatgggtcacgaggtaggagttcggaaagagagcgggaggatgatggccattcttcatcacggggcagtggtgctcgagctgatgataattctcaggatgggagaggggggctccagaggaagttttctgaacaaaatattggcgctccacccaattatgaagaagctgtcagtgattcacgcagccctgtatatagtgaaagggatggtggggagaccccacaagttaccgctccaggagctgcttctcctcctcccccacaagttgctgctccagaggctgcttctcctccaactggaaccaacacagccaatacaactgctacttttgttaatgaatcaccttctcagaaagttgagactttcgatgaatttgatccacgcagtgcgttttcagctggccctccagcatatgcatctacagatggtgttacagctcctccaactgtgacttctatgtctgcccctaccacctcaaacagtgttgagatggacttgcttggttcccttgcagacgtattttcatcaaacgcattggccattgtaccagctgattctatctatgttgaaaccaatggacaagcaaacgctggtccagctccatcgttttctacatctcagccatcaactcagtcatttgatgacccatttggtgactctcctttcaaggccttcacttctactgacaccgactcaaccccacagcagaattttggagcttctttccagccaccacctccagccttcacttcagaggtctcacatcctgatactgctcataactttggctttggggactcattttccgccgttgccaatcctgatcctgcttctcagaatgtgcaacctccatcgaactcaccaggttttcctcaagagcaatttgctacatctcagagtggtattgatatcctcgctggcattctcccaccatctggacctccagtacaatcgggtccctcaataccaacatctcaatttcctcccagtggaaacaacatgtacgagggatttcattctcagccgccggtatctacagctccaaacctgcctggacaaactccatttggacaagctgttcaaccatataacatggttcctcattctcaaaatatgactggagccatgccatttaatagtggaggcttcatgcaccagccgggctcacaaactccttactctaccccaagtggaccagctggtcagttcatggcacaccaaggtcatggaatgccgccatcccatggtccacaacgaactcaatccggacctgttactctgcaagggaacaacaatgtcatgggagacatgttctcgcaagctacgcccaactccttgacgtcatcatcatctcatccagatctcacacctttaacaggagcaattgagattgttcctccgcctcagaaaaagtttgagccaaaatcatcagtctgggcagacacgttgagcagggggcttgttaactttaacatatctggatctaaaacaaatccattggcagacataggagttgacttcgaggcgatcaacaggagagagaaacggctggagaaacaaacaaacacaccagcaacatcgactatcaatatgggtaaagccatgggatcaggcactggcttagggcgttctggtgcaactgctatgagacctccacctaatccaatgacaggctctggcatgcccatgggcggaggaatgggtgttggtagctacggaggtatgaaccagaaccaacccatgggtatgggtatgggggccggaatgaaccaaaaccaaccgatgggtatgggaatgggacccggcatgaacatgaacatgaacatgggaggatatggccaaggctatccgatgcaaccacaaaacccagggatggtacctagcccaaacatgcctggcaataactacaatccgatgatgggtcaaggtggttacaaccctcaacaatcctatggtggtggataccggtaa

SEQ ID NO: 78 - protein, 895 aa, Arabidopsis thaliana
MKKVFGQTVRDLKREVNKKVLKVPGVEQKVLDATSNEPWGPHGSLLADLAQASRNYHEYQLIMVVIWKRLSDTGKNWRHVYKALTVLEYMVGHGSERVIDEIRERAYQISTLSDFQYIDSGGRDQGSNVRKKSQSLVALVNDKERIAEVRQKAAANRDKYRSSAPGGMYKPSGGYGDKYDYGSRDEERSSYGREREYGYRDDDRNSRDGDRHSRDSEDRYGRDGNRDDDYRGRSRSVDNYGSRGRSSEREREDDGHSSSRGSGARADDNSQDGRGGLQRKFSEQNIGAPPNYEEAVSDSRSPVYSERDGGETPQVTAPGAASPPPPQVAAPEAASPPTGTNTANTTATFVNESPSQKVETFDEFDPRSAFSAGPPAYASTDGVTAPPTVTSMSAPTTSNSVEMDLLGSLADVFSSNALAIVPADSIYVETNGQANAGPAPSFSTSQPSTQSFDDPFGDSPFKAFTSTDTDSTPQQNFGASFQPPPPAFTSEVSHPDTAHNFGFGDSFSAVANPDPASQNVQPPSNSPGFPQEQFATSQSGIDILAGILPPSGPPVQSGPSIPTSQFPPSGNNMYEGFHSQPPVSTAPNLPGQTPFGQAVQPYNMVPHSQNMTGAMPFNSGGFMHQPGSQTPYSTPSGPAGQFMAHQGHGMPPSHGPQRTQSGPVTLQGNNNVMGDMFSQATPNSLTSSSSHPDLTPLTGAIEIVPPPQKKFEPKSSVWADTLSRGLVNFNISGSKTNPLADIGVDFEAINRREKRLEKQTNTPATSTINMGKAMGSGTGLGRSGATAMRPPPNPMTGSGMPMGGGMGVGSYGGMNQNQPMGMGMGAGMNQNQPMGMGMGPGMNMNMNMGGYGQGYPMQPQNPGMVPSPNMPGNNYNPMMGQGGYNPQQSYGGGYR

SEQ ID NO: 79 - DNA, 2688 bp, Arabidopsis thaliana
atgaagaaagtcttcggacaaactgttagagaccttaagagagaggtcaacaagaaagtgctcaaagttcctggagtagaacagaaggttctagatgctactagtaatgagccatggggtccacatggatcacttcttgctgatcttgcgcaagcttccagaaattatcatgaatatcagctgatcatggtggtcatatggaaacgccttagcgacaccggaaaaaactggcggcatgtctataaggctttgacagttttggagtacatggtaggccatggatcagaacgtgttatagacgagattagagaacgtgcatatcaaatttcgacattgtccgattttcagtatattgattccggtggtagagatcaaggaagcaatgttaggaagaaatcacagagcctggtggctttggtgaatgacaaggaaagaatagctgaagtcagacagaaggctgctgctaatagagataagtatcgcagctcagcaccaggtgggatgtataagccttcaggcggatatggggataaatatgattacggaagccgggatgaagagcgaagtagttatggaagagaaagagaatatggttacagagatgatgatagaaatagtcgtgatggagatcgtcattccagggactctgaagaccggtatgggagagatggtaatagggatgatgattacaggggaaggagcagaagtgttgataactatgggtcacgaggtaggagttcggaaagagagcgggaggatgatggccattcttcatcacggggcagtggtgctcgagctgatgataattctcaggatgggagaggggggctccagaggaagttttctgaacaaaatattggcgctccacccagttatgaagaagctgtcagtgattcacgcagccctgtatatagtgaaagggatggtggggagaccccacaagttaccgctccaggagctgcttctcctcctcccccacaagttgctgctccagaggctgcttctcctccaactggaaccaacacagccaatacaactgctacttttgttaatgaatcaccttctcagaaagttgagactttcgatgaatttgatccacgcagtgcgttttcagctggccctccagcatatgcatctacagatggtgttacagctcctccaactgtgacttctatgtctgcccctaccacctcaaacagtgttgagatggacttgcttggttcccttgcagacgtattttcatcaaacgcattggccattgtaccagctgattctatctatgttgaaaccaatggacaagcaaacgctggtccagctccatcgttttctacatctcagccatcaactcagtcatttgatgacccatttggtgactctcctttcaaggccttcacttctactgacaccgactcaaccccacagcagaattttggagcttctttccagccaccacctccagccttcacttcagaggtctcacatcctgatactgctcataactttggctttggggactcattttccgccgttgccaatcctgatcctgcttctcagaatgtgcaacctccatcgaactcaccaggttttcctcaagagcaatttgctacatctcagagtggtattgatatcctcgctggcattctcccaccatctggacctccagtacaatcgggtccctcaataccaacatctcaatttcctcccagtggaaacaacatgtacgagggatttcattctcagccgccggtatctacagctccaaacctgcctggacaaactccatttggacaagctgttcaaccatataacatggttcctcattctcaaaatatgactggagccatgccatttaatagtggaggcttcatgcaccagccgggctcacaaactccttactctaccccaagtggaccagctggtcagttcatggcacaccaaggtcatggaatgccgccatcccatggtccacaacgaactcaatccggacctgttactctgcaagggaacaacaatgtcatgggagacatgttctcgcaagctacgcccaactccttgacgtcatcatcatctcatccagatctcacacctttaacaggagcaattgagattgttcctccgcctcagaaaaagtttgagccaaaatcatcagtctgggcagacacgttgagcagggggcttgttaactttaacatatctggatctaaaacaaatccattggcagacataggagttgacttcgaggcgatcaacaggagagagaaacggctggagaaacaaacaaacacaccagcaacatcgactatcaatatgggtaaagccatgggatcaggcactggcttagggcgttctggtgcaactgctatgagacctccacctaatccaatgacaggctctggcatgcccatgggcggaggaatgggtgttggtagctacggaggtatgaaccagaaccaacccatgggtatgggtatgggggccggaatgaaccaaaaccaaccgatgggtatgggaatgggacccggcatgaacatgaacatgaacatgggaggatatggccaaggctatccgatgcaaccacaaaacccagggatggtacctagcccaaacatgcctggcaataactacaatccgatgatgggtcaaggtggttacaaccctcaacaatcctatggtggtggataccggtaa

SEQ ID NO: 80 - protein, 895 aa, Arabidopsis thaliana
MKKVFGQTVRDLKREVNKKVLKVPGVEQKVLDATSNEPWGPHGSLLADLAQASRNYHEYQLIMVVIWKRLSDTGKNWRHVYKALTVLEYMVGHGSERVIDEIRERAYQISTLSDFQYIDSGGRDQGSNVRKKSQSLVALVNDKERIAEVRQKAAANRDKYRSSAPGGMYKPSGGYGDKYDYGSRDEERSSYGREREYGYRDDDRNSRDGDRHSRDSEDRYGRDGNRDDDYRGRSRSVDNYGSRGRSSEREREDDGHSSSRGSGARADDNSQDGRGGLQRKFSEQNIGAPPSYEEAVSDSRSPVYSERDGGETPQVTAPGAASPPPPQVAAPEAASPPTGTNTANTTATFVNESPSQKVETFDEFDPRSAFSAGPPAYASTDGVTAPPTVTSMSAPTTSNSVEMDLLGSLADVFSSNALAIVPADSIYVETNGQANAGPAPSFSTSQPSTQSFDDPFGDSPFKAFTSTDTDSTPQQNFGASFQPPPPAFTSEVSHPDTAHNFGFGDSFSAVANPDPASQNVQPPSNSPGFPQEQFATSQSGIDILAGILPPSGPPVQSGPSIPTSQFPPSGNNMYEGFHSQPPVSTAPNLPGQTPFGQAVQPYNMVPHSQNMTGAMPFNSGGFMHQPGSQTPYSTPSGPAGQFMAHQGHGMPPSHGPQRTQSGPVTLQGNNNVMGDMFSQATPNSLTSSSSHPDLTPLTGAIEIVPPPQKKFEPKSSVWADTLSRGLVNFNISGSKTNPLADIGVDFEAINRREKRLEKQTNTPATSTINMGKAMGSGTGLGRSGATAMRPPPNPMTGSGMPMGGGMGVGSYGGMNQNQPMGMGMGAGMNQNQPMGMGMGPGMNMNMNMGGYGQGYPMQPQNPGMVPSPNMPGNNYNPMMGQGGYNPQQSYGGGYR

SEQ ID NO: 81 - DNA, 1941 bp, Arabidopsis thaliana
atgaagaaagtcttcggacaaactgttagagaccttaagagagaggtcaacaagaaagtgctcaaagttcctggagtagaacagaaggttctagatgctactagtaatgagccatggggtccacatggatcacttcttgctgatcttgcgcaagcttccagaaattatcatgaatatcagctgatcatggtggtcatatggaaacgccttagcgacaccggaaaaaactggcggcatgtctataaggctttgacagttttggagtacatggtaggccatggatcagaacgtgttatagacgagattagagaacgtgcatatcaaatttcgacattgtccgattttcagtatattgattccggtggtagagatcaaggaagcaatgttaggaagaaatcacagagcctggtggctttggtgaatgacaaggaaagaatagctgaagtcagacagaaggctgctgctaatagagataagtatcgcagctcagcaccaggtgggatgtataagccttcaggcggatatggggataaatatgattacggaagccgggatgaagagcgaagtagttatggaagagaaagagaatatggttacagagatgatgatagaaatagtcgtgatggagatcgtcattccagggactctgaagaccggtatgggagagatggtaatagggatgatgattacaggggaaggagcagaagtgttgataactatgggtcacgaggtaggagttcggaaagagagcgggaggatgatggccattcttcatcacggggcagtggtgctcgagctgatgataattctcaggatgggagaggggggctccagaggaagttttctgaacaaaatattggcgctccacccagttatgaagaagctgtcagtgattcacgcagccctgtatatagtgaaagggatggtggggagaccccacaagttaccgctccaggagctgcttctcctcctcccccacaagttgctgctccagaggctgcttctcctccaactggaaccaacacagccaatacaactgctacttttgttaatgaatcaccttctcagaaagttgagactttcgatgaatttgatccacgcagtgcgttttcagctggccctccagcatatgcatctacagatggtgttacagctcctccaactgtgacttctatgtctgcccctaccacctcaaacagtgttgagatggacttgcttggttcccttgcagacgtattttcatcaaacgcattggccattgtaccagctgattctatctatgttgaaaccaatggacaagcaaacgctggtccagctccatcgttttctacatctcagccatcaactcagtcatttgatgacccatttggtgactctcctttcaaggccttcacttctactgacaccgactcaaccccacagcagaattttggagcttctttccagccaccacctccagccttcacttcagaggtctcacatcctgatactgctcataactttggctttggggactcattttccgccgttgccaatcctgatcctgcttctcagaatgtgcaacctccatcgaactcaccaggttttcctcaagagcaatttgctacatctcagagtggtattgatatcctcgctggcattctcccaccatctggacctccagtacaatcgggtccctcaataccaacatctcaatttcctcccagtggaaacaacatgtacgaggggtttcattctcagccgccggtatctacagctccaaacctgcctggacaaactccatttggacaagctgttcaaccatataacatggttcctcattctcaaaatatgactggagccatgccatttaatagtggaggcttcatgcaccagccgggctcacaaactccttactctaccccaagtggaccagctggtcagttcatggcactggcttag

SEQ ID NO: 82 - protein, 646 aa, Arabidopsis thaliana
MKKVFGQTVRDLKREVNKKVLKVPGVEQKVLDATSNEPWGPHGSLLADLAQASRNYHEYQLIMVVIWKRLSDTGKNWRHVYKALTVLEYMVGHGSERVIDEIRERAYQISTLSDFQYIDSGGRDQGSNVRKKSQSLVALVNDKERIAEVRQKAAANRDKYRSSAPGGMYKPSGGYGDKYDYGSRDEERSSYGREREYGYRDDDRNSRDGDRHSRDSEDRYGRDGNRDDDYRGRSRSVDNYGSRGRSSEREREDDGHSSSRGSGARADDNSQDGRGGLQRKFSEQNIGAPPSYEEAVSDSRSPVYSERDGGETPQVTAPGAASPPPPQVAAPEAASPPTGTNTANTTATFVNESPSQKVETFDEFDPRSAFSAGPPAYASTDGVTAPPTVTSMSAPTTSNSVEMDLLGSLADVFSSNALAIVPADSIYVETNGQANAGPAPSFSTSQPSTQSFDDPFGDSPFKAFTSTDTDSTPQQNFGASFQPPPPAFTSEVSHPDTAHNFGFGDSFSAVANPDPASQNVQPPSNSPGFPQEQFATSQSGIDILAGILPPSGPPVQSGPSIPTSQFPPSGNNMYEGFHSQPPVSTAPNLPGQTPFGQAVQPYNMVPHSQNMTGAMPFNSGGFMHQPGSQTPYSTPSGPAGQFMALA

SEQ ID NO: 83 - DNA, 2688 bp, Arabidopsis thaliana
atgaagaaagtcttcggacaaactgttagagaccttaagagagaggtcaacaagaaagtgctcaaagttcctggagtagaacagaaggttctagatgctactagtaatgagccatggggtccacatggatcacttcttgctgatcttgcgcaagcttccagaaattatcatgaatatcagctgatcatggtggtcatatggaaacgccttagcgacaccggaaaaaactggcggcatgtctataaggctttgacagttttggagtacatggtaggccatggatcagaacgtgttatagacgagattagagaacgtgcatatcaaatttcgacattgtccgattttcagtatattgattccggtggtagagatcaaggaagcaatgttaggaagaaatcacagagcctggtggctttggtgaatgacaaggaaagaatagctgaagtcagacagaaggctgctgctaatagagataagtatcgcagctcagcaccaggtgggatgtataagccttcaggcggatatggggataaatatgattacggaagccgggatgaagagcgaagtagttatggaagagaaagagaatatggttacagagatgatgatagaaatagtcgtgatggagatcatcattccagggactctgaagaccggtatgggagagatggtaatagggatgatgattacaggggaaggagcagaagtgttgataactatgggtcacgaggtaggagttcggaaagagagcgggaggatgatggccattcttcatcacggggcagtggtgctcgagctgatgataattctcaggatgggagaggggggctccagaggaagttttctgaacaaaatattggcgctccacccagttatgaagaagctgtcagtgattcacgcagccctgtatatagtgaaagggatggtggggagaccccacaagttaccgctccaggagctgcttctcctcctcccccacaagttgctgctccagaggctgcttctcctccaactggaaccaacacagccaatacaactgctacttttgttaatgaatcaccttctcagaaagttgagactttcgatgaatttgatccacgcagtgcgttttcagctggccctccagcatatgcatctacagatggtgttacagctcctccaactgtgacttctatgtctgcccctaccacctcaaacagtgttgagatggacttgcttggttcccttgcagacgtattttcatcaaacgcattggccattgtaccagctgattctatctatgttgaaaccaatggacaagcaaacgctggtccagctccatcgttttctacatctcagccatcaactcagtcatttgatgacccatttggtgactctcctttcaaggccttcacttctactgacaccgactcaaccccacagcagaattttggagcttctttccagccaccacctccagccttcacttcagaggtctcacatcctgatactgctcataactttggctttggggactcattttccgccgttgccaatcctgatcctgcttctcagaatgtgcaacctccatcgaactcaccaggttttcctcaagagcaatttgctacatctcagagtggtattgatatcctcgctggcattctcccaccatctggacctccagtacaatcgggtccctcaataccaacatctcaatttcctcccagtggaaacaacatgtacgagggatttcattctcagccgccggtatctacagctccaaacctgcctggacaaactccatttggacaagctgttcaaccatataacatggttcctcattctcaaaatatgactggagccatgccatttaatagtggaggcttcatgcaccagccgggctcacaaactccttactctaccccaagtggaccagctggtcagttcatggcacaccaaggtcatggaatgccgccatcccatggtccacaacgaactcaatccggacctgttactctgcaagggaacaacaatgtcatgggagacatgttctcgcaagctacgcccaactccttgacgtcatcatcatctcatccagatctcacacctttaacaggagcaattgagattgttcctccgcctcagaaaaagtttgagccaaaatcatcagtctgggcagacacgttgagcagggggcttgttaactttaacatatctggatctaaaacaaatccattggcagacataggagttgacttcgaggcgatcaacaggagagagaaacggctggagaaacaaacaaacacaccagcaacatcgactatcaatatgggtaaagccatgggatcaggcactggcttagggcgttctggtgcaactgctatgagacctccacctaatccaatgacaggctctggcatgcccatgggcggaggaatgggtgttggtagctacggaggtatgaaccagaaccaacccatgggtatgggtatgggggccggaatgaaccaaaaccaaccgatgggtatgggaatgggacccggcatgaacatgaacatgaacatgggaggatatggccaagactatccgatgcaaccacaaaacccagggatggtacctagcccaaacatgcctggcaataactacaatccgatgatgggtcaaggtggttacaaccctcaacaatcctatggtggtggataccggtaa

SEQ ID NO: 84 - protein, 895 aa, Arabidopsis thaliana
MKKVFGQTVRDLKREVNKKVLKVPGVEQKVLDATSNEPWGPHGSLLADLAQASRNYHEYQLIMVVIWKRLSDTGKNWRHVYKALTVLEYMVGHGSERVIDEIRERAYQISTLSDFQYIDSGGRDQGSNVRKKSQSLVALVNDKERIAEVRQKAAANRDKYRSSAPGGMYKPSGGYGDKYDYGSRDEERSSYGREREYGYRDDDRNSRDGDHHSRDSEDRYGRDGNRDDDYRGRSRSVDNYGSRGRSSEREREDDGHSSSRGSGARADDNSQDGRGGLQRKFSEQNIGAPPSYEEAVSDSRSPVYSERDGGETPQVTAPGAASPPPPQVAAPEAASPPTGTNTANTTATFVNESPSQKVETFDEFDPRSAFSAGPPAYASTDGVTAPPTVTSMSAPTTSNSVEMDLLGSLADVFSSNALAIVPADSIYVETNGQANAGPAPSFSTSQPSTQSFDDPFGDSPFKAFTSTDTDSTPQQNFGASFQPPPPAFTSEVSHPDTAHNFGFGDSFSAVANPDPASQNVQPPSNSPGFPQEQFATSQSGIDILAGILPPSGPPVQSGPSIPTSQFPPSGNNMYEGFHSQPPVSTAPNLPGQTPFGQAVQPYNMVPHSQNMTGAMPFNSGGFMHQPGSQTPYSTPSGPAGQFMAHQGHGMPPSHGPQRTQSGPVTLQGNNNVMGDMFSQATPNSLTSSSSHPDLTPLTGAIEIVPPPQKKFEPKSSVWADTLSRGLVNFNISGSKTNPLADIGVDFEAINRREKRLEKQTNTPATSTINMGKAMGSGTGLGRSGATAMRPPPNPMTGSGMPMGGGMGVGSYGGMNQNQPMGMGMGAGMNQNQPMGMGMGPGMNMNMNMGGYGQDYPMQPQNPGMVPSPNMPGNNYNPMMGQGGYNPQQSYGGGYR

SEQ ID NO: 85 - DNA, 2838 bp, Oryza sativa
atgaagaaagtattcgatcaaacagtccgggacctaaaaagagaggtgaacaagaaggtcctcaaggtgcctggtatagaacaaaagattcttgatgccacaagcaacgagccatggggcccacatggatcactcttggcagaaatcgcccaagcaacacaaaattaccatgagtaccagatggtcatgaatgttgtgtggaagaggatcaatgacactggtaaaaattggcggcatgtttataagggattgattgtcctggattacttggttgctcatggtacagagcgagttattgatgacataagggaacattcttatcagatatcgacactagctgatttccagtatatcgattcgagtgggagagatcaaggtagcaatgtacggcggaaatcccagagccttgttagtttagttaatgacaaagagaggatacaggaagttaggcagaaagcacttgctaccagggacaaataccggagtgcattcgccaccagtggaacacacaggagcccaggtggctatgacaatgaccgctatgaaggaagctatggcagtaggtatgataacagaaatggctacgggggagaaagagagtatggatatagggatgatgacagatatggtgttgctggaactactcccaatcgggaaggagatcgttattctagggattctaatgagcagcgctacagcagagatagagaagatgagtacaaaggaagtcatagcaaccatgaatatgcagaaggatcaggtcgcaggagctatggacgagatagggattcatatggggatgatgaagcttattcatcccgtggccggcaaagcaatgctgacggacctactcaggatgagaggcccatggagcggaagccttctaaccagcagattgcttcaccaccgccaaactatgaagatgtcacaagagatacacaggataataatcatgatggacgaaatggagggactgtgcctgtgccagttgctgcagcaaaggtgtcttcacctccaagaacaagtgtacccccaggtcaggtgaatggtgtacatgataatactgtggaagacgtacctgcaccaccacctactcatcctgaagttaatgggtttgacgagtttgatcctcgtggatcagtaccagatacctcacctccagtgaacccctcacaagccgtgaatagcttggaaatggatttattcggaccagatcctattaattcgttggctttggtatctgtgcctcagccaactgccagcccaaatgttgagccatcagcaaatccaggatttgagagtaacagttttatgggcatgccaccggcttctactggattcaatgaggcctttgatgcaactaatccttttggggatcctacgcctttcaaggctgttcatgaagaaactcctgcagtttctcagacaaatgctgcacctgctggttctttccatgctactgaacctgctgcagatgcaaatcctttccagcctgcttcagcagcaagctttggttttggagacactcttggcgacctctcttttggatcgaatgctgcacccgggcagcaagatatttttgtgcccacctcatcacattcagaggtaccacctgcaaacccatctgtgcaccctgaacaggcagtcccatcttatgtctcctcccaggcacctcagcctgcagctgctggtccacaaactcatgctgctcccgcttcatttgcttctcaagcacctcccacttcatttgcttctcaagcacctcaagcaggggcaccctatcctcaggctgcctccacatttcctcattcacaagcatctcatcctgcagccactaatccatctacaatccctcagaatgttgccacaccatttgctcctttacaaatgcctcaacctgtaccatcaggccaatcaaactattttatgcaaccagttccagggactggcattaatggcatgtctggggctccttcacagaatggagcaccatcctacatcccttcacaggcttctcaatttgcagctccaacaaatctacagccctctcagccaaccttccccccacaaactgccatggcagcttcacaggcaacatcaatttctcgaggggcatctcagcctcttgcagtgccgaattcaatgccttctggtgtgaactttccattacaatcaagttcatcagctccccctgaaacaatcctttcagccttgcaagttagtcagtctgagccagtgaagaaatttgagtccaaatctacagtttgggctgatacattgagccgaggtttagtcaatctggacatctctggaccaaaggctaatccgcacgctgatattggagttgacttcgattcaatcaatcgcaaggagaaaaggcaagaaaagaaagtctctcaagctcctgtggtatctacgatcactatgggcaaagccatgggaactggctccggcatcggtcgggcaggtgcgagtgccatggcacctccagccaacccaatgggtgcaagcaggggcattggcatgggtatgggcgctgctggttccggttacggtggtggaatgggaatgaaccggccaatgggcatgggaatgggaatgaaccaacaaatgggtatgggaatggggatgaaccaacaggccatgggaatggggatgaaccaacaggccatgggaatggggatgaaccaacaaccaatgggaatgaacatgggcatggggatgaaccagggtatgggaatgaacatgcggcctcctatgggaatgggtccaggtagtggatataatccaatgggtaccggatacggagggcagcaaccatatggtgggtacaggtga

SEQ ID NO: 86 - protein, 945 aa, Oryza sativa
MKKVFDQTVRDLKREVNKKVLKVPGIEQKILDATSNEPWGPHGSLLAEIAQATQNYHEYQMVMNVVWKRINDTGKNWRHVYKGLIVLDYLVAHGTERVIDDIREHSYQISTLADFQYIDSSGRDQGSNVRRKSQSLVSLVNDKERIQEVRQKALATRDKYRSAFATSGTHRSPGGYDNDRYEGSYGSRYDNRNGYGGEREYGYRDDDRYGVAGTTPNREGDRYSRDSNEQRYSRDREDEYKGSHSNHEYAEGSGRRSYGRDRDSYGDDEAYSSRGRQSNADGPTQDERPMERKPSNQQIASPPPNYEDVTRDTQDNNHDGRNGGTVPVPVAAAKVSSPPRTSVPPGQVNGVHDNTVEDVPAPPPTHPEVNGFDEFDPRGSVPDTSPPVNPSQAVNSLEMDLFGPDPINSLALVSVPQPTASPNVEPSANPGFESNSFMGMPPASTGFNEAFDATNPFGDPTPFKAVHEETPAVSQTNAAPAGSFHATEPAADANPFQPASAASFGFGDTLGDLSFGSNAAPGQQDIFVPTSSHSEVPPANPSVHPEQAVPSYVSSQAPQPAAAGPQTHAAPASFASQAPPTSFASQAPQAGAPYPQAASTFPHSQASHPAATNPSTIPQNVATPFAPLQMPQPVPSGQSNYFMQPVPGTGINGMSGAPSQNGAPSYIPSQASQFAAPTNLQPSQPTFPPQTAMAASQATSISRGASQPLAVPNSMPSGVNFPLQSSSSAPPETILSALQVSQSEPVKKFESKSTVWADTLSRGLVNLDISGPKANPHADIGVDFDSINRKEKRQEKKVSQAPVVSTITMGKAMGTGSGIGRAGASAMAPPANPMGASRGIGMGMGAAGSGYGGGMGMNRPMGMGMGMNQQMGMGMGMNQQAMGMGMNQQAMGMGMNQQPMGMNMGMGMNQGMGMNMRPPMGMGPGSGYNPMGTGYGGQQPYGGYR

SEQ ID NO: 87 - DNA, 3072 bp, Arabidopsis thaliana
atgaagaaagcatttggtcaaactgtcagagacctcaagagaggggtcaacaagaaagtgcttaaagtacctggaatagaacagaaggttctagatgctaccagcaatgagtcctggggtccgcatggatcacttcttgcggacattgcacatgcttcgagaaattaccatgaataccagattactatgggagtgttatggaaacgtcttagtgactctggaaaaaattggcggcatgtctataaggcattgacagtcttggagtacatggtaggccatggatcagaacgtgtcatagaagaggttaaagaacatgcatatcaaattacgacattatctggttttcagtatattgattccagcggtaaagatcaaggtagcaatgtcaggaagaaggcgcagagccttgtggctttggttaatgacaaagaaagaataacggaggtcagagagaaggctgctgctaacagagataagtatcataactcaatgcataggccgtcaggaggatatggggacaaatatgattacgaaggccgctatggagacagagatgaagggcgaagtagttatgggaaagagagagaatatggttacagggatgatgatagaaatagtcgtgatggcgatcgttattctagagactctgaagaccgatatggaagagatggtaacacggatgacgaataccgtggaaggagcagaagtgttgataattacaatggatcaagaggtaggagctcggacagggaacggcctattgaggatgatggccaatcctcatcgcgggatagtggtgcgccagctgatgatcattctcaagatgggagaggggggctagagagaaagttctctgaacaaaatattggtgctgctccacctagttatgaagaagctgtgagtgaatcacggagccctgtatacagtgaaagggatggtggagagaccccacaagttgctcctccaggagctgctgcttctcctcttgctgaaaacatcagcgtggacaacaaagctgctgattttgttaatgaatcatctcctcagcaagttgaggcttttgatgaatttgatccacgaggttcagtttcagcatgtgcacctacagctggtgcttcggttcctgcacctatcccaccaacagtggtttctacgcctgccccgcctgcctcaattaatgcagaaatggatttgcttggctctctttcagatgtattttcaccaaatcccttggctattgtaacatctgattccacttctgttgaaaccaatggacaagcaaacactggtttagctccatcgttttctacttctcagtcatctactcagccttttgatgatccatttggtgactctcctttcaaagccatcacttctgctgacactgagacaagccaacatcagagttttggagttccttttcagccaacaccaccaacttcaaatcctaacaatgaacataactttggttttggggaagcattttcagctgttaccgattctgaacctggcgttcaaaatatgcaagctccaccgaacttatccgtctttcctcaagagcagtttgatacatcgcagagcgaaatcgatattcttgccggcattctcccaccatctggaccgccagtttctctgtctccacaaccagattccactatgccaacatcccaatttcatcccaatggtaactcctatgaaagctatcatcatcaagccgcgcctacagatctaaacatgcaaggacaaacaccgtttggtcaagcttcacaacaatttaacatggtttcacattcacaaaatcatcatgaaggtatgcaattcaacaatgggggcttcacgcaacagccaggctatgcaggtccagcaacctctcaacctccacaatatactcctggtgtatcttcacacccaccaagtgagagttttcctcaccaaccaggttctgccacctcagcaagctcgcaaactccttacgctactacacccaatgtatcagctgggcagtttgatggtgggagtttcatgacacagcaaccttatggtgtgacacaacaagttcatgttgtcccttcccatataccacagcgaactcaatctggacctgttgcagcgtttgggaataataacaatatcgttggagatatgcaccaacctggttctaccccctcatcaagctcgcaaactccttaccctactacgcccaatgcaccaagtggtcagtttgatggtggaaattttatgacacaacaaccttatggtgtgataccgcaagttcatggcgtcccttcccatataccacagcgaactcaatctggacctgttgcagcgcacgggaatagtaacaatgttgttggggatatgttttcaccagctggactaagttccttggagacatcagcatcgcaaccatctctcacacctttaacaggagcaattgaaattgttccccaaaatcagaagaagtttgagccaaaatcaacaatttgggctgatacattaagtagagggctagttaacttcaacatttctggaccgaaaacaaatccattggcggatataggagttgacttcgaggcaatcaacaggaaagagaaacggctagagaaaccaactatcacacaacaacaagtaacatcaactatcaacatggggaaagccatgggatctggtactggcttaggtcgcgctggtgcaggtgctatgagacctccaacaaattcaatggtaggctcaagcatgcccacgggcatgaatgttggtggctatggaggcatgaaccaacaccaacccataggcatgaaccaaaaccatcccatgggcatgaaccaaaacctttccatgggaatgaaccagaactatcccatgggaatgaaccaaaactatccaatgggaatgggcatgaacatgaacatgggcgggtatggacaagggtatccgatgcaaccacaacaaggaatgggcatggctcctcctggtgcaccacaaggcatgaccggtgcctataatccaatgatgggtcaaggcggttacaaccctcagcagcagcaaccatatggtggaggttaccggtaa

SEQ ID NO: 88 - protein, 1023 aa, Arabidopsis thaliana
MKKAFGQTVRDLKRGVNKKVLKVPGIEQKVLDATSNESWGPHGSLLADIAHASRNYHEYQITMGVLWKRLSDSGKNWRHVYKALTVLEYMVGHGSERVIEEVKEHAYQITTLSGFQYIDSSGKDQGSNVRKKAQSLVALVNDKERITEVREKAAANRDKYHNSMHRPSGGYGDKYDYEGRYGDRDEGRSSYGKEREYGYRDDDRNSRDGDRYSRDSEDRYGRDGNTDDEYRGRSRSVDNYNGSRGRSSDRERPIEDDGQSSSRDSGAPADDHSQDGRGGLERKFSEQNIGAAPPSYEEAVSESRSPVYSERDGGETPQVAPPGAAASPLAENISVDNKAADFVNESSPQQVEAFDEFDPRGSVSACAPTAGASVPAPIPPTVVSTPAPPASINAEMDLLGSLSDVFSPNPLAIVTSDSTSVETNGQANTGLAPSFSTSQSSTQPFDDPFGDSPFKAITSADTETSQHQSFGVPFQPTPPTSNPNNEHNFGFGEAFSAVTDSEPGVQNMQAPPNLSVFPQEQFDTSQSEIDILAGILPPSGPPVSLSPQPDSTMPTSQFHPNGNSYESYHHQAAPTDLNMQGQTPFGQASQQFNMVSHSQNHHEGMQFNNGGFTQQPGYAGPATSQPPQYTPGVSSHPPSESFPHQPGSATSASSQTPYATTPNVSAGQFDGGSFMTQQPYGVTQQVHVVPSHIPQRTQSGPVAAFGNNNNIVGDMHQPGSTPSSSSQTPYPTTPNAPSGQFDGGNFMTQQPYGVIPQVHGVPSHIPQRTQSGPVAAHGNSNNVVGDMFSPAGLSSLETSASQPSLTPLTGAIEIVPQNQKKFEPKSTIWADTLSRGLVNFNISGPKTNPLADIGVDFEAINRKEKRLEKPTITQQQVTSTINMGKAMGSGTGLGRAGAGAMRPPTNSMVGSSMPTGMNVGGYGGMNQHQPIGMNQNHPMGMNQNLSMGMNQNYPMGMNQNYPMGMGMNMNMGGYGQGYPMQPQQGMGMAPPGAPQGMTGAYNPMMGQGGYNPQQQQPYGGGYR

SEQ ID NO: 89 - DNA, 2664 bp, Vitis vinifera
atgaagaaggccattggtcaaactgttagggaccttaagagagaggtgaataagaaagttcttaaagttccaggaatagaacagaaggttctggatgctactagcaatgagccttggggtcctcatggaacacatcttgcagatattgcacaggctaccagaaactatcacgagtaccaaatgatcatgtcagtaatctggaagcggattaatgatacaggaaagaattggcggcatgtctacaaggctttgacagttctggaatacttggtaggccatggttctgagcgtgtcatagatgagattcgggagcatatataccaaatatcaactttgtcagactttcaatatattgattcaagtgggagggatcagggaagcaatgtcagaaagaaatctcaaagtctcgtggctctggtgaatgataaagaaaggatacaggaagttagacagaaggctgctgccaacagggacaagtttcgcaacacaaactcagcaggcggtatgtataggcccagttcatattctagttcaggaggatatggtgaccgttatgatgatgatcgatatgaaggccgctatgggagagacgaagatcgaaatggttatgggagagaaagagaatggggcagcagagatgatgaccggtatggtagaaatggggactcatatgagattctgatgaacggtatggtagagatggctataaggatgatgattacaggggaagaagtcgaagcaatgaggactaccagtatggctctagaagtaggagtgctgatagagatagggaccgagagcaaccattcatctagaggtggtgcccgaactgatgagcatcctcagtatggaaggcagcttgaacgaaaattttctgaacaaaatcttgatgctcctcctagttatgaagaagctgtagctgatgcccacagtcctgttcatgatgagagggatggagcaaccccagcagcacctgcccctaaaacatcttctccacctgtaagcactagtcctagccaagcaacaactgctgttggtccttctacatctcctcctgccaacaaggaagttgatgcttttgatgaatttgatccgcgcggtccagtctcaggtatggagaatcctagagatttgtctgtttgccagtatgtgcagcttgagtccaaacaatttgcttgcgcttctgtcccagctacatcaattagtccggaaatggacttacttggctctctgtcagagtcattttcttcaaattcattggctcttgtgccatctggacctgcaaccacaacatctgaggctgctgtccttggaaatgctgggtctgcacccgcatcagcagcaatgccatctggatctgcttcttttgaagacccatttggtgactccccttttagagctttgccttcagcagagagtgtaccagctgaacctcaggattcagcttccacaacttccttccagaccatgaatcaaacatcaggaccacccttcccagttacccaaggagtggacacgggttccaactttgactttggggacactttccctggcataacttacacgccatccggtgtctccactgcacaacctccttctgcaagcccacaattttcaccccaagagcaatggattccccagcagaacaatgatatcctagcagacattctaccaccttcaggatcttcagctcctgccatttcacaggctgctttcccagctccaactggccagtctgtgcagccaaaccctaatgttgttgggggctttcttgcacagtcaggatctgcagatcatgcagcttcacaattttctcctcagattccaactggaccagctgcacaatataacaatgggaacttcctttcacatgggccagttacacatcctagcaatgataaccttggtggcttatttccacaagctggaccgcctggttcagtgatgtcacagtctactccccctgcttcaacaggttcacttgctatagttcctcaagcatccaaggacaagtttgaaacgaagtcaacggtttgggctgatacactgagcagaggattagtcaatttgaatatatctggagctaaaattaatccattggcggatattggaattgattttgatgccattaatcggaaagaaaagaggatggagaaacctaagcctgctaccacagctcctgtatctactactacaatgggcaaggcaatgggatctggctctggaatgggtcgtgctggtgcaggtgcactcaggcctccaccaaatactatgatgggttcaggtatgggaatgggcatgggcatgggtagtggccctggtgcaggcatgagtatgggtatgggtggtggtcctggttcaggcatgggtatgggtatgggtggtgcccctggagtgggcatgggtatgggtatgggtggtgcccctgcagcagcgggtatgggtatgggtatggggatgggaggaggcatgggcatgggaggatatggaggcatgaatcaacctatgggcatgggtatgaatgtgggcatgggcatgaatatgggaatggggcaaggagcccagatgcaacaaccaactggattgcctcctgggggttataaccccatgatgggctcaggtggttatgctcctcagcaaccatatggtggtggctaccgatga

SEQ ID NO: 90 - protein, 887 aa, Vitis vinifera
MKKAIGQTVRDLKREVNKKVLKVPGIEQKVLDATSNEPWGPHGTHLADIAQATRNYHEYQMIMSVIWKRINDTGKNWRHVYKALTVLEYLVGHGSERVIDEIREHIYQISTLSDFQYIDSSGRDQGSNVRKKSQSLVALVNDKERIQEVRQKAAANRDKFRNTNSAGGMYRPSSYSSSGGYGDRYDDDRYEGRYGRDEDRNGYGREREWGSRDDDRYGRNGDSYEILMNGMVEMAIRMMITGEEVEAMRTTSMALEVGVLIEIGTESNHSSRGGARTDEHPQYGRQLERKFSEQNLDAPPSYEEAVADAHSPVHDERDGATPAAPAPKTSSPPVSTSPSQATTAVGPSTSPPANKEVDAFDEFDPRGPVSGMENPRDLSVCQYVQLESKQFACASVPATSISPEMDLLGSLSESFSSNSLALVPSGPATTTSEAAVLGNAGSAPASAAMPSGSASFEDPFGDSPFRALPSAESVPAEPQDSASTTSFQTMNQTSGPPFPVTQGVDTGSNFDFGDTFPGITYTPSGVSTAQPPSASPQFSPQEQWIPQQNNDILADILPPSGSSAPAISQAAFPAPTGQSVQPNPNVVGGFLAQSGSADHAASQFSPQIPTGPAAQYNNGNFLSHGPVTHPSNDNLGGLFPQAGPPGSVMSQSTPPASTGSLAIVPQASKDKFETKSTVWADTLSRGLVNLNISGAKINPLADIGIDFDAINRKEKRMEKPKPATTAPVSTTTMGKAMGSGSGMGRAGAGALRPPPNTMMGSGMGMGMGMGSGPGAGMSMGMGGGPGSGMGMGMGGAPGVGMGMGMGGAPAAAGMGMGMGMGGGMGMGGYGGMNQPMGMGMNVGMGMNMGMGQGAQMQQPTGLPPGGYNPMMGSGGYAPQQPYGGGYR

SEQ ID NO: 91 - DNA, 3075 bp, Arabidopsis thaliana
atgaagaaagcatttggtcaaactgtcagagacctcaagagaggggtcaacaagaaagtgcttaaagtacctggaatagaacagaaggttctagatgctaccagcaatgagtcctggggtccgcatggatcacttcttgcggacattgcacatgcttcgagaaattaccatgaataccagattactatgggagtgttatggaaacgtcttagtgactctggaaaaaattggcggcatgtctataaggcattgacagtcttggagtacatggtaggccatggatcagaacgtgtcatagaagaggttaaagaacatgcatatcaaattacgacattatctggttttcagtatattgattccagcggtaaagatcaaggtagcaatgtcaggaagaaggcgcagagccttgtggctttggttaatgacaaagaaagaataacggaggtcagagagaaggctgctgctaacagagataagtatcataactcaatgcataggccgtcaggaggatatggggacaaatatgattacgaaggccgctatggagacagagatgaagggcgaagtagttatgggaaagagagagaatatggttacagggatgatgatagaaatagtcgtgatggcgatcgttattctagagactctgaagaccgatatggaagagatggtaacacggatgacgaataccgtggaaggagcagaagtgttgataattacaatggatcaagaggtaggagctcggacagggaacggcctattgaggatgatggccaatcctcatcgcgggatagtggtgcgccagctgatgatcattctcaagatgggagaggggggctagagagaaagttctctgaacaaaatattggtgctgctccacctagttatgaagaagctgtgagtgaatcacggagccctgtatacagtgaaagggatggtggagagaccccacaagttgctcctccaggagctgctgcttctcctcttgctgaaaacatcagcgtggacaacaaagctgctgattttgttaatgaatcatctcctcagcaagttgaggcttttgatgaatttgatccacgaggttcagtttcagcagcatgtgcacctacagctggtgcttcggttcctgcacctatcccaccaacagtggtttctacgcctgccccgcctgcctcaattaatgcagaaatggatttgcttggctctctttcagatgtattttcaccaaatcccttggctattgtaacatctgattccacttctgttgaaaccaatggacaagcaaacactggtttagctccatcgttttctacttctcagtcatctactcagccttttgatgatccatttggtgactctcctttcaaagccatcacttctgctgacactgagacaagccaacatcagagttttggagttccttttcagccaacaccaccaacttcaaatcctaacaatgaacataactttggttttggggaagcattttcagctgttaccgattctgaacctggcgttcaaaatatgcaagctccaccgaacttatccgtctttcctcaagagcagtttgatacatcgcagagcgaaatcgatattcttgccggcattctcccaccatctggaccgccagtttctctgtctccacaaccagattccactatgccaacatcccaatttcatcccaatggtaactcctatgaaagctatcatcatcaagccgcgcctacagatctaaacatgcaaggacaaacaccgtttggtcaagcttcacaacaatttaacatggtttcacattcacaaaatcatcatgaaggtatgcaattcaacaatgggggcttcacgcaacagccaggctatgcaggtccagcaacctctcaacctccacaatatactcctggtgtatcttcacacccaccaagtgagagttttcctcaccaaccaggttctgccacctcagcaagctcgcaaactccttacgctactacacccaatgtatcagctgggcagtttgatggtgggagtttcatgacacagcaaccttatggtgtgacacaacaagttcatgttgtcccttcccatataccacagcgaactcaatctggacctgttgcagcgtttgggaataataacaatatcgttggagatatgcaccaacctggttctaccccctcatcaagctcgcaaactccttaccctactacgcccaatgcaccaagtggtcagtttgatggtggaaattttatgacacaacaaccttatggtgtgataccgcaagttcatggcgtcccttcccatataccacagcgaactcaatctggacctgttgcagcgcacgggaatagtaacaatgttgttggggatatgttttcaccagctggactaagttccttggagacatcagcatcgcaaccatctctcacacctttaacaggagcaattgaaattgttccccaaaatcagaagaagtttgagccaaaatcaacaatttgggctgatacattaagtagagggctagttaacttcaacatttctggaccgaaaacaaatccattggcggatataggagttgacttcgaggcaatcaacaggaaagagaaacggctagagaaaccaactatcacacaacaacaagtaacatcaactatcaacatggggaaagccatgggatctggtactggcttaggtcgcgctggtgcaggtgctatgagacctccaacaaattcaatggtaggctcaagcatgcccacgggcatgaatgttggtggctatggaggcatgaaccaacaccaacccataggcatgaaccaaaaccatcccatgggcatgaaccaaaacctttccatgggaatgaaccagaactatcccatgggaatgaaccaaaactatccaatgggaatgggcatgaacatgaacatgggcgggtatggacaagggtatccgatgcaaccacaacaaggaatgggcatggctcctcctggtgcaccacaaggcatgaccggtgcctataatccaatgatgggtcaaggcggttacaaccctcagcagcagcaaccatatggtggaggttaccggtaa

SEQ ID NO: 92 - protein, 1024 aa, Arabidopsis thaliana
MKKAFGQTVRDLKRGVNKKVLKVPGIEQKVLDATSNESWGPHGSLLADIAHASRNYHEYQITMGVLWKRLSDSGKNWRHVYKALTVLEYMVGHGSERVIEEVKEHAYQITTLSGFQYIDSSGKDQGSNVRKKAQSLVALVNDKERITEVREKAAANRDKYHNSMHRPSGGYGDKYDYEGRYGDRDEGRSSYGKEREYGYRDDDRNSRDGDRYSRDSEDRYGRDGNTDDEYRGRSRSVDNYNGSRGRSSDRERPIEDDGQSSSRDSGAPADDHSQDGRGGLERKFSEQNIGAAPPSYEEAVSESRSPVYSERDGGETPQVAPPGAAASPLAENISVDNKAADFVNESSPQQVEAFDEFDPRGSVSAACAPTAGASVPAPIPPTVVSTPAPPASINAEMDLLGSLSDVFSPNPLAIVTSDSTSVETNGQANTGLAPSFSTSQSSTQPFDDPFGDSPFKAITSADTETSQHQSFGVPFQPTPPTSNPNNEHNFGFGEAFSAVTDSEPGVQNMQAPPNLSVFPQEQFDTSQSEIDILAGILPPSGPPVSLSPQPDSTMPTSQFHPNGNSYESYHHQAAPTDLNMQGQTPFGQASQQFNMVSHSQNHHEGMQFNNGGFTQQPGYAGPATSQPPQYTPGVSSHPPSESFPHQPGSATSASSQTPYATTPNVSAGQFDGGSFMTQQPYGVTQQVHVVPSHIPQRTQSGPVAAFGNNNNIVGDMHQPGSTPSSSSQTPYPTTPNAPSGQFDGGNFMTQQPYGVIPQVHGVPSHIPQRTQSGPVAAHGNSNNVVGDMFSPAGLSSLETSASQPSLTPLTGAIEIVPQNQKKFEPKSTIWADTLSRGLVNFNISGPKTNPLADIGVDFEAINRKEKRLEKPTITQQQVTSTINMGKAMGSGTGLGRAGAGAMRPPTNSMVGSSMPTGMNVGGYGGMNQHQPIGMNQNHPMGMNQNLSMGMNQNYPMGMNQNYPMGMGMNMNMGGYGQGYPMQPQQGMGMAPPGAPQGMTGAYNPMMGQGGYNPQQQQPYGGGYR

SEQ ID NO: 93 - DNA, 804 bp, Arabidopsis thaliana
atgaagaaagtcttcggacaaactgttagagaccttaagagagaggtcaacaagaaagtgctcaaagttcctggagtagaacagaaggttctagatgctactagtaatgagccatggggtccacatggatcacttcttgctgatcttgcgcaagcttccagaaattatcatgaatatcagctgatcatggtggtcatatggaaacgccttagcgacaccggaaaaaactggcggcatgtctataaggctttgacagttttggagtacatggtaggccatggatcagaacgtgttatagacgagattagagaacgtgcatatcaaatttcgacattgtccgattttcagtatattgattccggtggtagagatcaaggaagcaatgttaggaagaaatcacagagcctggtggctttggtgaatgacaaggaaagaatagctgaagtcagacagaaggctgctgctaatagagataagtatcgcagctcagcaccaggtgggatgtataagccttcaggcggatatggggataaatatgattacggaagccgggatgaagagcgaagtagttatggaagagaaagagaatatggttacagagatgatgatagaaatagtcgtgatggagatcgtcattccagggactctgaagaccggtatgggagagatggtaatagggatgatgattacaggggaaggagcagaagtgttgataactatgggtcacgaggtaggagttcggaaagagagcgggaggatgatggccattcttcatcacggtatgttaaatttcaagtcgcctaa

SEQ ID NO: 94 - protein, 267 aa, Arabidopsis thaliana
MKKVFGQTVRDLKREVNKKVLKVPGVEQKVLDATSNEPWGPHGSLLADLAQASRNYHEYQLIMVVIWKRLSDTGKNWRHVYKALTVLEYMVGHGSERVIDEIRERAYQISTLSDFQYIDSGGRDQGSNVRKKSQSLVALVNDKERIAEVRQKAAANRDKYRSSAPGGMYKPSGGYGDKYDYGSRDEERSSYGREREYGYRDDDRNSRDGDRHSRDSEDRYGRDGNRDDDYRGRSRSVDNYGSRGRSSEREREDDGHSSSRYVKFQVA

SEQ ID NO: 95 - DNA, 2454 bp, Vitis vinifera
atgcctggaagtgatgagcgaatggttctggatgctactagcaatgagccttggggtcctcatggaacacatcttgcagatattgcacaggctaccagaaactatcacgagtaccaaatgatcatgtcagtaatctggaagcggattaatgatacaggaaagaattggcggcatgtctacaagactttgtcagactttcaatatattgattcaagtgggagggatcagggaagcaatgtcagaaagaaatctcaaagtctcgtggctctggtgaatgataaagaaaggatacaggaagttagacagaaggctgctgccaacagggacaagtttcgcaacacaaactcagcaggcggtatgtataggcccagttcatattctagttcaggaggatatggtgaccgttatgatgatgatcgatatgaaggccgctatggaagagacgaagatcgaaatggttatgggagagaaagagaatggggcagcagagatgatgaccggtatggtagaaatggggactcatatggtcctgaaggggatcgctatggcagagattctgatgaacggtatggtagagatggttataaggatgatgattacaggggaagaagtcgaagcaatgaggactaccagtatggctctagaagtaggagtgctgatagagatagggaccgtgcttttgatgaggagagcaaccattcatctagaggtggtgcccgaactgatgagcatcctcagtatggaaggcagcttgaacgaaaattttctgaacaaaatcttgatgctcctcctagttatgaagaagctgtagctgatgcccacagtcctgttcatgatgagagggatggagcaaccccagcagcacctgcccctaaaacatcttctccacctgtaagcactagtcctagccaagcaacaactgctgttggtccttctacatctcctcctgccaacaaggaagttgatgcttttgatgaatttgatccgcgcggtccagtttcagctgtcccagctacatcaattagtccggaaatggacttacttggctctctgtcagagtcattttcttcaaattcattggctcttgtgccatctggacctgcaaccacaacatctgaggccgctgtccttggaaatgctgggtctgcacccgcatctgcagcaaagccatctggatctgctgttatgagccagtcttttgaagacccatttggtgactccccttttagagctttgccttcagcagagagtgtaccagctcaacctcaggattcagcttccacaacttccttccagaccatgaatcaaacatcaggaccacccttcccagttacccaaggagtggacacgggttccaactttgactttggggacactttccctggcataacttacacgccatccggtgtctctactgcacaacctccttctgcaagcccacaattttcaccccaagagcaatggtttccccagcagaacaatgatatcctagcagatattctaccaccttcaggatcttcagctcctgccatttcacaggctgctttcccagctccaactggccagtctgtgcagccaaaccctaatgttgttgggggctttcttgcacagtcaggatctgcagatcatgcagcttcacaattttctcctcagattccaactggaccagctgcacaatataacaatgggaacttcctttcacagttgggttctgcagcgcctgtaccttcacaggctcctcttcaargtcctgtaccttctcagtctccttttcaaagtcctgtaccttctcagtctccttttcaagctcctgtaccttctcagtctccttttcaagctccagctaaaatagtgtcttcatatgcagctaaaattaatccattggcggatattggaattgattttgatgccattaatcggaaagaaaagaggatggagaaacctaagcctgctaccacagctcctgtatctactactacaatgggcaaggcaatgggatctggttctggaatgggtcgtgctggtgcaggtgcactcaggcctccaccaaatactatgatgggttcaggtatgggaatgggcatgggcatgggcatgggtagtggccctggtgcaggcatgagtatgggtatgggtggtggtcctggttcaggcatgggtatgggtatgggtggtgcccctggagtgggcatgggtatgggtatgggtggtgcccctgcagcagcgggtatgggtatgggtatgggtatggggatgggaggaggcatgggcatgggaggatatggaggcatgaatcaacctatgggcatgggtatgaatgtgggcatgaatatgggaatggggcaaggagcccagatgcaacaaccaactggattgcctcctgggggttataaccccatgatgggctcaggtggttatgctcctcagcaaccatatggtggtggctaccgatga

SEQ ID NO: 96 - protein, 817 aa, Vitis vinifera
  UNSURE (583)..(583): Xaa can be any naturally occurring amino acid
MPGSDERMVLDATSNEPWGPHGTHLADIAQATRNYHEYQMIMSVIWKRINDTGKNWRHVYKTLSDFQYIDSSGRDQGSNVRKKSQSLVALVNDKERIQEVRQKAAANRDKFRNTNSAGGMYRPSSYSSSGGYGDRYDDDRYEGRYGRDEDRNGYGREREWGSRDDDRYGRNGDSYGPEGDRYGRDSDERYGRDGYKDDDYRGRSRSNEDYQYGSRSRSADRDRDRAFDEESNHSSRGGARTDEHPQYGRQLERKFSEQNLDAPPSYEEAVADAHSPVHDERDGATPAAPAPKTSSPPVSTSPSQATTAVGPSTSPPANKEVDAFDEFDPRGPVSAVPATSISPEMDLLGSLSESFSSNSLALVPSGPATTTSEAAVLGNAGSAPASAAKPSGSAVMSQSFEDPFGDSPFRALPSAESVPAQPQDSASTTSFQTMNQTSGPPFPVTQGVDTGSNFDFGDTFPGITYTPSGVSTAQPPSASPQFSPQEQWFPQQNNDILADILPPSGSSAPAISQAAFPAPTGQSVQPNPNVVGGFLAQSGSADHAASQFSPQIPTGPAAQYNNGNFLSQLGSAAPVPSQAPLQXPVPSQSPFQSPVPSQSPFQAPVPSQSPFQAPAKIVSSYAAKINPLADIGIDFDAINRKEKRMEKPKPATTAPVSTTTMGKAMGSGSGMGRAGAGALRPPPNTMMGSGMGMGMGMGMGSGPGAGMSMGMGGGPGSGMGMGMGGAPGVGMGMGMGGAPAAAGMGMGMGMGMGGGMGMGGYGGMNQPMGMGMNVGMNMGMGQGAQMQQPTGLPPGGYNPMMGSGGYAPQQPYGGGYR

SEQ ID NO: 97 - DNA, 1632 bp, Chlamydomonas reinhardtii
atgtggcacactgtggccttcacgaagctcaaagtgctggaggcgaccaacgaggagccatggggaccccacgggtccgcgatgggggagattgcgcgtgcagcggaggacccagagaaatacaacctcatcatgaacgtcatcagcgagcgcctgcagatgcgggacgagaactggcgcctgtgctacaaggcgctgctgctgctcgagtaccttgttaaaaacgggccttggcgtgtggtagacgagctcaaccgcagcgtgtcctcgctggagcgactgcgtgatgagtttgagtaccgtgacccgcagggcaaggaccacggtgtcaacgtgcggcagagggcgggtgagctggcctcactcgtcagcaacaccgaccgcgttcgccaggagcgtgaaaaggctgccaaaaacgccaacaagtataagggcgtatcgtcgtcggacatgcgcggatttggtggcggtaacctgacatggcttcctgcgcgcccccagcaggcctaccccggcacggagagcgtgcacatgcctgccggcagcagcagcagccaccacagccgcaccggatcgggctccaacgccaacacctttaacgccttcaacaaccccacagccgccggccactcgggcggcggctttggtgggctgcgcggcactggaccggcggctgggtctggggtggggcccgaggagggcgaggacccattcgaggccacccgcaagcggatagagcggctgaaggcggagggcgcgctgccggagccgccgccgtcagcgctgccgccgggtctggcagacgtgccggccgcaggcgccaaggctcccaagaagctgtccgaaatcaaaatcaaccccgcggtggccgccacgttcgcgtccatgcccatcgcgccgccgcccagcggtgcaaccataggcaagctggcaccgcctccgggcgccggtggtgctgccaagccgccgctgccgctgcccgccgcgagcaacaccctggacctgtttggggagctgagcggccccacatcctcgcagcccgctcagtcacagcccgcggccagcgctgcttcggactgggacgctttcggctcggcgccagctgttgcgccggcgcccgctgcggctccggccgcgccggtggatccctttgccgtgctcgcctctggacccaccgcggccacagcaacatctggtggcagcgcctcgttgggcggctttaagcccgcggtagcgacgcacgcgagtacctcttccaagccgggcgtgccgccgccgctgtcattcgacgacttcgctgagctgcccgccgcgccgcctgcagcgggggcagaccccttcgcggcactggcaagcggcggctccgcggcggcttcgcgcccagcggtaccagcgccagcacctgcggcggccttcgacccgtttgcgccggcgccgtcgaccatggcgacagcgcctgcgacgagcagtgggtttggcgactttatgagcggcaaccggtcctcatcgcacgccagctccggcggcgcggctagctcgggcggcgcgaccatggcaatgaacaaggcgggcgcggcgcacggggctgcggggcaaaagagcaacgacccgtttgcagggctagggttctag

SEQ ID NO: 98 - protein, 543 aa, Chlamydomonas reinhardtii
MWHTVAFTKLKVLEATNEEPWGPHGSAMGEIARAAEDPEKYNLIMNVISERLQMRDENWRLCYKALLLLEYLVKNGPWRVVDELNRSVSSLERLRDEFEYRDPQGKDHGVNVRQRAGELASLVSNTDRVRQEREKAAKNANKYKGVSSSDMRGFGGGNLTWLPARPQQAYPGTESVHMPAGSSSSHHSRTGSGSNANTFNAFNNPTAAGHSGGGFGGLRGTGPAAGSGVGPEEGEDPFEATRKRIERLKAEGALPEPPPSALPPGLADVPAAGAKAPKKLSEIKINPAVAATFASMPIAPPPSGATIGKLAPPPGAGGAAKPPLPLPAASNTLDLFGELSGPTSSQPAQSQPAASAASDWDAFGSAPAVAPAPAAAPAAPVDPFAVLASGPTAATATSGGSASLGGFKPAVATHASTSSKPGVPPPLSFDDFAELPAAPPAAGADPFAALASGGSAAASRPAVPAPAPAAAFDPFAPAPSTMATAPATSSGFGDFMSGNRSSSHASSGGAASSGGATMAMNKAGAAHGAAGQKSNDPFAGLGF

SEQ ID NO: 99 - DNA, 594 bp, Ostreococcus lucimarinus
atgttcaaagccgcgctgacgacgatcaagtccgcgatcccggacgaggtggcgcaggcggcgaagaagcgcgtcaatcaatggaaaggcatcggcgacgacgaagcgctcgtccgcgacgcgacgaactccgagccctggggcccgcacggggagcagctgcgcgcgatcgcgcggctcacgcgcgatgggaagtgggacgtcgtgcgcgaggtgctggagaaacgcttgaagagcgcgccggaggagtggcgacgcgcgtacaaggcgctcaccgtcgtcgagtatctcgtcgcgaacggcgatcgagcgatcgcggaggacgtcaggcgaaggcgaatgatggacggcgcgctgaggttcgagtacaaggacgcgcgagggaaggatgagggggtgaacgtgcgacatcgagcggaaaagatcaaggcgttggtggaagatccgagatcggtcgaggaggcgagggaaaaggcggagagaaatcgcggcaagtacgcggggatgtcgagcgaagaagcgcggacgcacgcgcggagagggtcgacgtcgagcgcgggtgggtcgttttcgggagggagcgcgctcggcggc

SEQ ID NO: 100 - protein, 198 aa, Ostreococcus lucimarinus
MFKAALTTIKSAIPDEVAQAAKKRVNQWKGIGDDEALVRDATNSEPWGPHGEQLRAIARLTRDGKWDVVREVLEKRLKSAPEEWRRAYKALTVVEYLVANGDRAIAEDVRRRRMMDGALRFEYKDARGKDEGVNVRHRAEKIKALVEDPRSVEEAREKAERNRGKYAGMSSEEARTHARRGSTSSAGGSFSGGSALGG

SEQ ID NO: 101 - DNA, 2435 bp, Oryza sativa
ggtcgttattccgcggcgccatcttcctctctcctccgccctacgcgtcgccccgcctcgcctggccttccccgcgcatcctgcacggagccctaggaggctaggagaggaagaagaacacgcgcgcggggggatagtggatagccgaagcaactcgatcgatctgtggccgcgatcgtagctctcttcttggtccgatctcgtctctcccggcatggatttcaggaaggtgctcgaccagaccgtccgggagataaggagggaggtaaatcttaaggtgctcaaggtgccggaaatcgagcagaaggttcttgatgccaccagcgacgagccgtgggggccgcatggttccgatttggcagatatcgccagggccaccaagagctacggtgatagcgaaattataatgaatgtgttatggcaacgcctggggaacacacttgcgaattggcgtcacgtgtataaggcgttggctgtgatcgagtaccttctagctaatggcaccgaacgtgcagctgatggcattgttgacaatagctcacgaattgcaaaactcacaagatttgagtatttggagcctaatggaaaagatgttgggctcaatgtgcgtaagaaggctgaagctgttctagcaattttggatgacagggagaagcttcaagaggtcagagagaaggctgccgttactagagacaagtattttggcttatcatcaactggaataacgcacaaatcgagcgcagcatcatttggcagtggcagctactcatctggtagccactatgggagcacaggaggttcaagggaggtgggatcattcaaggatatacacacaggcacagaatggaaaaagaacaagaaggaaacagtgtcaaactacagcagcaatagagaagggtctaaagaaattactaacagtgcaaccagttataagtcaaaaaagagtgaaaggcatggtagaagaaatcaaaattccttaacattacactcgaagttatctgcaaatattagcaccacatctgaagccccaagctcaaagaaaggggaaaatgaggatgatgatgatttcaacccacgaggattttctacatctactggaacaggtaccacaagatctaatcacctggatctctttggtccaagcttgatggatgatcttgttgattctactacatccacttcaacagcaacgccaaatgttagcacacctgctgtgccagaggttgatttatttgcagatgcagctttccaatcagccaatgctccattggaggcagcaacggtttctcacactcaggacaaaattgatttgtttgctggcagactgtcttctgctgattcatttacttcagacacagagttctcagtacgcggtagtcctaacaagtcatcggagaaaaaaatgtcttccgttgtgcatccttctacttctgcttttgatcccttcaaacaatcttttgccacctcatttccttcagattcagagttctcagttcatgatccgacaagcaaatcttctcaaggaaaaactcccacaccagaacattcaagtacagcagcttttgatccttttgctgcaattccactgaagagttttgatggatccgaatcttttggaacattttcttcgaacacagcctcaaacattactgaactgccacgggattcttctgggggtcccaaaagttctgaccatggtcctttggaggatgccaattttgatgccttcacttcacacttgggatcttccacaacaagtgcaactgagtccatgaataagcccatcaaaaagcttgggcaggactcgatgtcagcatcaaaatcagttgcaaagaaagaaacttttcaggtcaaatctggcatatgggctgactctttgagccgaggattgattgatttgaatataacttcgtcacaaaagaaggtcgatctctccgatgttgggattgtcggaccgctgagcggcggatctgaggataaaggcccgggggcgacgatgggcacagcaccaggccttgtcagttctagttttccatctaaaacagaaacatccagtggaagcggtcattttcagcaccaacagtttggaagctttaagtgatttttatccaggatatgtcttttgttctatggttcttgcagagtacttcttggagcattcgtacagctccatgcctataagagtaaacgtgtatatagctaccaaactctgtgcgatgatcaggagacgtgttgccaactaaccagcatcttctctgcccttgaggcattaatatttttttacttatggcgaaatggatatgttttgtgtacatgagtaaagaaccaatgccatggtagcaattgtaaaaagggttcatcaattatgtgtgatacacgctcatatgaattttgaaaaatgaataacgcaaagcattctggatgctggcagtgcc

SEQ ID NO: 102 - protein, 628 aa, Oryza sativa; identical to SEQ ID NO: 72

SEQ ID NO: 103 - protein, 602 aa, Oryza sativa
MDFRKVLDQTVREIRREVNLKVLKVPEIEQKVLDATSDEPWGPHGSDLADIARATKSYGDSEIIMNVLWQRLGNTLANWRHVYKALAVIEYLLANGTERAADGIVDNSSRIAKLTRFEYLEPNGKDVGLNVRKKAEAVLAILDDREKLQEVREKAAVTRDKYFGLSSTGITHKSSAASFGSGSYSSGSHYGSTGGSREVGSFKDIHTGTEWKKNKKETVSNYSSNREGSKEITNSATSYKSKKSERHGRSTTSEAPSSKKGENEDDDDFNPRGFSTSTTPNVSTPAVPEVDLFADAAFQSANAPLEAATVSHTQDKIDLFAGRLSSADSFTSDTEFSVRGSPNKSSEKKMSSVVHPSTSAFDPFKQSFATSFPSDSEFSVHDPTSKSSQGKTPTPEHSSTAAFDPFAAIPLKSFDGSESFGTFSSNTASNITELPRDSSGGPKSSDHGPLEDANFDAFTSHLGSSTTSATESMNKPIKKLGQDSMSASKSVAKKETFQVKSGIWADSLSRGLIDLNITSSQKKVDLSDVGIVGPLSGGSEDKGPGATMGTAPGLVSSSFPSKTETSSGSEYFLEHSYSSMPIRVNVYIATKLCAMIRRRVAN

SEQ ID NO: 104 - protein, 618 aa, Oryza sativa
MDFRKVLDQTVREIRREVNLKVLKVPEIEQKVLDATSDEPWGPHGSDLADIARATKSYGDSEIIMNVLWQRLGNTLANWRHVYKALAVIEYLLANGTERAADGIVENSSRIAKLTRFEYLEPNGKDVGLNVRKKAEAVLAILDDREKLQEVREKAAVTRDKYFGLSSTGITHKSSAASFGSGSYSSGSHYGSTGGSREVGSFKDIHTGTEWKKNKKETVSNYSSNREGSKEITNSATSYKSKKSERHGRSLMDDLVDSTTSTSTATPNVSTPAVPEVDLFADAAFQSANAPLEAATVSHTQDKIDLFAGRLSSADSFTSDTEFSVRGSPNKSSEKKMSSVVHPSTSAFDPFKQSFATSFPSDAEFSVHDPTSKSSQGKTPTPEHSSTAAFDPFAAIPLKSFDGSESFGTFSSNTASNITELQRDSSGGPKSSDHGPLEDANFDAFTSHLGSSTTSATESMNKPIKKLGQDSMSASKSVAKKETFQVKSGIWADSLSRGLIDLNITSSQKKVDLSDVGIVGPLSGGSEDKGPWYMGATMGTAPGLVSSSFPSKTETSSGSAHFQHHSLEALSDFYPGYVFCSMVLAEYFLEHSYSSMPIRVNVYIATKLSAMIRRRVAN

SEQ ID NO: 105 - DNA, 2388 bp, Oryza sativa
gggccatcgcccaccggcccacgagcaccatctctcctctctgctccgcgagtggccttttgcccacctaagccgcctccccatcctctgcttgctccggcgggcggcgagcgccccgccggaccgacgacgacctcgccgtcgagctggtggccgctcaacctctagcgctcgcagggatcccgggaagcctccctcggccgcgtcaccaccggcatctggtgctttccgctcccaccacagtgtgctgctctcgtcagttgccaccgcccgactcggcgctccggagcccagatcttggttccggaggatcctctccggcgatggatttcgtgaaggttttcgatcaggccgtgcgggagataaagagggaggtcaatttgaaggtgctcaaggttccagagctcgaacagaaggtacttgatgcaacaagcgatgaaccttggggccctcatggtactactctttcagagctatcacatgccaccaagaagttcgctgaatgtcagatggtaatgagtgtcctctggactaggctgtctgagcgaggctcgaaatggcgtcacgtgtataaggctttgacaattattgagtacttaatagccaatggttctgagcgggcagttgatgacattcttgatcactattcaaagatctcggttctttcaagttttgaatatgtggaacctaatggaaaagatgctggaataaatgtgagaaagaaagtcgaaactatattgggactcataaatgacaaggagaaaataaagtctgtaagagagaaagccgccagtaatcgtgacaagtatgttgggctatcatcgacagggataacatataagtcaagctctgcttcatttggtagcaactatagttctggtgaacgttatgggagttttagtggtacaagggaaggtgattcatacggtgacagttatagggataaagaacctgttaaatcctctccaagttatactggcagccagaaatctggcagcaggataaaaaaggatgtgaatagaaggaatgaggattcaccgagctccttgaagtctaatgcaaaaggcaatgaggacgattttgatgattttgatcctcgtggatcttcttcaaatggtgcagctaatacaaacaccagtggcgtggatctttttgccccaaacttattggatgatttcatcgatgtgcctgcagcagcaactcatgaaacaaacgactctgcagacgctcaggttgatctgtttgctgatgcagatttccaatcagcaataccaagtacagaaacagctgcgggttcagatgtccagggcaatgtagacctttttgcggaacagccagccttcacagcagcctttccaccacagacagggtttattccaccaccaagttctgggacatctgaagcaaatacttccacgtctaagaacacaactcctgaaccttttgatccttttggtgctattcctataaacagctttgatggatctgatccatttggtgccttcaactccgatgttggatcatctagtataccaccacccacgcagagttctgttggaaatatcagcacaccaagtcagaaccctcaagcagcatctgactttggtggctttgtgtcgagcactgtagaaacagcagctaaggacccctttgatttttcaagtagcaatcttgggaaaacacctttggcagatccaaaggctgatgcatccgattttggtgcctttgtatcgcacagtgaggaagtagccaaggatccttttgatctttctttgagtaccagctctggaaggacaaaccaagcacctctggcggctcccaagtcagataccaagaaagaaaattttcaggtcaagtctggcatatgggctgactcattgagccgtggactgattgatctgaacataactggaccaaagaaggtgaacttagccgacgttgggattgtcggtggcctcgatgacgggtctgatgataaagctctgccctcatggaccatgggtgcaggaggttccagcctaggaatgtccggaattccttcatctacacaaagtggtggcattgagagcttagctaactacaacaagtaccagtttggctttaaatgagctttcatgtgaggctttctagtatatgccggttattgtcggaatgtcggcttgtgccttatttattttttgttgattctattctcccctcttttgatgcttacattcctttacaatcgcctccaaggatcgtgatcttggttcgtcttgtcgcgcttgtattgtatttattggatttgcggatgagagactcctacctatatcacaccctgattcaatttaactgtactgttatttcacaatcgtgttaatcctatggctcacctctatattgcgattt

SEQ ID NO: 106 - protein, 594 aa, Oryza sativa; identical to SEQ ID NO: 70

SEQ ID NO: 107 - protein, 593 aa, Oryza sativa
MDFVKVFDQAVREIKREVNLKVLKVPELEQKVLDATSDEPWGPHGTTLSELSHATKKFTGALYYEFYIGHYANTNGQSEQQTLALTIIEYLIANGSERAVDDILDHYSKISVLSSFEYVEPNGKDAGINVRKKVETILGLINDKEKIKSVREKAASNRDKYVGLSSTGITYKSSSASFGSNYSSGERYGSFSGTREGDSYGDSYRDKEPVKSSPSYTGSQKSGSRIKKDVNRRNEDSPSSLKSNAKGNEDDFDDFDPRGSSSNGAANTNTSGVDLFAPNLLDDFIDVPAAATHETNDSADAQVDLFADADFQSAIPSTETAAGSDVQGNVDLFAEQPAFTAAFPPQTGFIPPPSSGTSEANTSTSKNTTPEPFDPFGAIPINSFDGSDPFGAFNSDVGSSSIPPPTQSSVGNISTPSQNPQAASDFGGFVSSTVETAAKDPFDFSSSNLGKTPLADPKADASDFGAFVSHSEEVAKDPFDLSLSTSSGRTNQAPLAAPKSDTKKENFQVKSGIWADSLSRGLIDLNITGPKKVNLADVGIVGGLDDGSDDKALPSWTMGAGGSSLGMSGIPSSTQSGGIESLANYNKYQFGFK

SEQ ID NO: 108 - DNA, 3750 bp, Oryza sativa
gtcagggaagaagggaggacgcgacgcgacacgagcgcgagaggaaagcggaggagatcgaggagaaactccatttccccccccctcgccttctccgatttccctcgcgtggaatccccttggactcctccccctcccgccgccgcgcgagccgggcacggcgagcggcgccgccctgcccccgccgatctgctctgccttctcctcaggggcttgcaccgaggaggaggaggaggagagagctgagcagaacaagctagattctcaaggaagggcgccatgaagaaagtattcgatcaaacagtccgggacctaaaaagagaggtgaacaagaaggtcctcaaggtgcctggtatagaacaaaagattcttgatgccacaagcaacgagccatggggcccacatggatcactcttggcagaaatcgcccaagcaacacaaaattaccatgagtaccagatggtcatgaatgttgtgtggaagaggatcaatgacactggtaaaaattggcggcatgtttataagggattgattgtcctggattacttggttgctcatggtacagagcgagttattgatgacataagggaacattcttatcagatatcgacactagctgatttccagtatatcgattcgagtgggagagatcaaggtagcaatgtacggcggaaatcccagagccttgttagtttagttaatgacaaagagaggatacaggaagttaggcagaaagcacttgctaccagggacaaataccggagtgcattcgccaccagtggaacacacaggagcccaggtggctatgacaatgaccgctatgaaggaagctatggcagtaggtatgataacagaaatggctacgggggagaaagagagtatggatatagggatgatgacagatatggtgttgctggaactactcccaatcgggaaggagatcgttattctagggattctaatgagcagcgctacagcagagatagagaagatgagtacaaaggaagtcatagcaaccatgaatatgcagaaggatcaggtcgcaggagctatggacgagatagggattcatatggggatgatgaagcttattcatcccgtggccggcaaagcaatgctgacggacctactcaggatgagaggcccatggagcggaagccttctaaccagcagattgcttcaccaccgccaaactatgaagatgtcacaagagatacacaggataataatcatgatggacgaaatggagggactgtgcctgtgccagttgctgcagcaaaggtgtcttcacctccaagaacaagtgtacccccaggtcaggtgaatggtgtacatgataatactgtggaagacgtacctgcaccaccacctactcatcctgaagttaatgggtttgacgagtttgatcctcgtggatcagtaccagatacctcacctccagtgaacccctcacaagccgtgaatagcttggaaatggatttattcggaccagatcctattaattcgttggctttggtatctgtgcctcagccaactgccagcccaaatgttgagccatcagcaaatccaggatttgagagtaacagttttatgggcatgccaccggcttctactggattcaatgaggcctttgatgcaactaatccttttggggatcctacgcctttcaaggctgttcatgaagaaactcctgcagtttctcagacaaatgctgcacctgctggttctttccatgctactgaacctgctgcagatgcaaatcctttccagcctgcttcagcagcaagctttggttttggagacactcttggcgacctctcttttggatcgaatgctgcacccgggcagcaagatatttttgtgcccacctcatcacattcagaggtaccacctgcaaacccatctgtgcaccctgaacaggcagtcccatcttatgtctcctcccaggcacctcagcctgcagctgctggtccacaaactcatgctgctcccgcttcatttgcttctcaagcacctcccacttcatttgcttctcaagcacctcaagcaggggcaccctatcctcaggctgcctccacatttcctcattcacaagcatctcatcctgcagccactaatccatctacaatccctcagaatgttgccacaccatttgctcctttacaaatgcctcaacctgtaccatcaggccaatcaaactattttatgcaaccagttccagggactggcattaatggcatgtctggggctccttcacagaatggagcaccatcctacatcccttcacaggcttctcaatttgcagctccaacaaatctacagccctctcagccaaccttccccccacaaactgccatggcagcttcacaggcaacatcaatttctcgaggggcatctcagcctcttgcagtgccgaattcaatgccttctggtgtgaactttccattacaatcaagttcatcagctccccctgaaacaatcctttcagccttgcaagttagtcagtctgagccagtgaagaaatttgagtccaaatctacagtttgggctgatacattgagccgaggtttagtcaatctggacatctctggaccaaaggctaatccgcacgctgatattggagttgacttcgattcaatcaatcgcaaggagaaaaggcaagaaaagaaagtctctcaagctcctgtggtatctacgatcactatgggcaaagccatgggaactggctccggcatcggtcgggcaggtgcgagtgccatggcacctccagccaacccaatgggtgcaagcaggggcattggcatgggtatgggcgctgctggttccggttacggtggtggaatgggaatgaaccggccaatgggcatgggaatgggaatgaaccaacaaatgggtatgggaatggggatgaaccaacaggccatgggaatggggatgaaccaacaggccatgggaatggggatgaaccaacaaccaatgggaatgaacatgggcatggggatgaaccagggtatgggaatgaacatgcggcctcctatgggaatgggtccaggtagtggatataatccaatgggtaccggatacggagggcagcaaccatatggtgggtacaggtgagattatactgtacaatgcgatactcagtgaggggttgagaaacagtttaggaggcgtttggattttggtcacctggattttctttatgtatggtttcttttgttttgggtggggggggggggttataatttttcatcactattcttttcctatccatgttggatattgtatctactaaatatatgacatgtgaacgggggcaatgctacaactactgtgttgtgttggatgcaaagccttaatactataatcatcaatgtagctgtataattctctataggatgtttttttttcagtaaacattgtgattgtttcagcgttcttgctggcttgacaataaaaaggctgtaccattttgttcaagctatcttcctttctttttatgtcgtcacattttgaggtgcagacctgcagtttttgtgtcagatgtcacccgtcagtctgcaaatagtagtatatttttgctcgtccgaactttggaactacaggaatggcccatctctgctgtcgcctcttttctgttctgatgcgtggtcacacaagccactgttgacacagcaactttgtatctccattattgacacagcaactttgtatctgatcataatgaaacgaagaattttgtgagttcaa

SEQ ID NO: 109 - protein, 945 aa, Oryza sativa; identical to SEQ ID NO: 86

SEQ ID NO: 110 - protein, 945 aa, Oryza sativa
MKKVFDQTVRDLKREVNKKVLKVPGIEQKILDATSNEPWGPHGSLLAEIAQATQNYHEYQMVMNVVWKRINDTGKNWRHVYKGLIVLDYLVAHGTERVIDDIREHSYQISTLADFQYIDSSGRDQGSNVRRKSQSLVSLVNDKERIQEVRQKALATRDKYRSAFATSGTHRSPGGYDNDRYEGSYGSRYDNRNGYGGEREYGYRDDDRYGVAGTTPNREGDRYSRDSNEQRYSRDREDEYKGSHSNHEYAEGSGRRSYGRDRDSYGDDEAYSSRGRQSNADGPTQDERPMERKPSNQQIASPPPNYEDVTRDTQDNNHDGRNGGTVPVPVAAAKVSSPPRTSVPPGQVNGVHDNTVEDVPAPPPTHPEVNGFDEFDPRGSVPDTSPPVNPSQAVNSLEMDLFGPDPINSLALVSVPQPTASPNVEPSANPGFESNSFMGMPPASTGFNEAFDATNPFGDPTPFKAVHEETPAVSQTNAAPAGSFHATEPAADANPFQPASAASFGFGDTLGDLSFGSNAAPGQQDIFVPTSSHSEVPPANPSVHPEQAVPSYVSSQAPQPAAAGPQTHAAPASFASQAPPTSFASQAPQAGAPYPQAASTFPHSQASHPAATNPSTIPQNVATPFAPLQMPQPVPSGQSNYFMQPVPGTGINGMSGAPSQNGAPSYIPSQASQFAAPTNLQPSQPTFPPQTAMAASQATSISRGASQPLAVPNSMPSGVNFPLQSSSSAPPETILSALQVSQSEPVKKFESKSTVWADTLSRGLVNLDISGPKANPHADIGVDFDSINRKEKRQEKKVSQAPVVSTITMGKAMGTGSGIGRAGASAMAPPANPMGASRGIGMGMGAAGSGYGGGMGMNRPMGMGMGMNQQMGMGMGMNQQAMGMGINQQAMGMGMNQQPMGMNMGMGMNQGMGMNMRPPMGMGPGSGYNPMGTGYGGQQPYGGYR

SEQ ID NO: 111 - DNA, 1356 bp, Brassica napus
ttcccgggtcgacgatatgagattattgagcatacttaccaaatctctgtcagtatttcttttcttatatatttataagtcattttcctgtggtggaaccttgtgacatgatctttgtttgtgagttgttacagtcactcacgagttttgagtatgttgaaccgaatgggaaagatgtggggatcaatgtgagaaagaaggcggaaaacatagttgctctcttgaataacaaggagaagatctctcaaatcagagacaaagcaacagccaatcgtaacaagtacgttggcctctcctcaacaggaataacatataagtctggttcagcttcagcttcgtttggtggtggtagtggttcaagcaattatgacagctatagagatagggattccagagaagacaaggacgactacgagtcttttcaaaagtcaaggcgcggtgttaaaggtgaagaccaaagctacacttcgaagaaaagtttttcacgctatggcagtgcggaccaggatagtctatccagtggaaaaaagtctcccggctctggcaaacacagtgccataccttcacatgcatctgcagctccttcaaacaacgatgatgattttgatgattttgatccacgtggaacttccagcaagaagccttccgcggggagtgccaaccaagtggacctttttggagcagatctgattggtgacttcttggattctgggccaactgaaacatcttccaccaacaacaatgggaagtttcaagaggcggacttgtttgctgatgcagattttgtatcagcctccagtccaagaacagactttgggtcacaggcacagtttcttcagctcctgcgacggttgatctttttgcatctccggaaacagttgcacgcccagaagccaagattcctaaacctgagccgatcaccactccaagcattgttgacccatttgctgcagttcctatggaaaattttgatggatctgatccttttggtgccttcacttctcactcggcttcagtctctacaggtccacaggccccagttctacatgggagtgcaacaaacacaacaaccccaccctctttggcagactcgaaaccacaacagtttcaaaagaaggatcctttccaggtgaaatctggaatatgggcagattcgctgagccgtggactaattgatctcaatattactgctcccaaaaaggcttctcttgctgatgtgggtgttgtcggtggcctgagcaatgacgatgggaacaaggcatctgctgctgcctactactcagggtggtccatgggcgcaggatccgggctcggtaaaaccggaatatacaatgcccagcagcagcagcaacaaca

SEQ ID NO: 112 - protein, 341 aa, Brassica napus
MIFVCELLQSLTSFEYVEPNGKDVGINVRKKAENIVALLNNKEKISQIRDKATANRNKYVGLSSTGITYKSGSASASFGGGSGSSNYDSYRDRDSREDKDDYESFQKSRRGVKGEDQSYTSKKSFSRYGSADQDSLSSGKKSPGSGKHSAIPSHASAAPSNNDDDFDDFDPRGTSSKKPSAGSANQVDLFGADLIGDFLDSGPTETSSTNNNGKFQEADLFADADFVSASSPRTDFGSQAQFLQLLRRLIFLHLRKQLHAQKPRFLNLSRSPLQALLTHLLQFLWKILMDLILLVPSLLTRLQSLQVHRPQFYMGVQQTQQPHPLWQTRNHNSFKRRILSR

SEQ ID NO: 113 - DNA, 2051 bp, Glycine max
tataatcacaatattaggagaaatatatatgaacaaaccatcccaaaaagcttaacaagcttggtaatgccgacacacaaagaatgggtgaaaatgtgatgggaagagtataaaatctgagaattttacttttggaacccgccaaattgatgttgttggtttccaaggtttgagaaaaagtcgtctccagctgctggctgtgaaggagtgaatccagacctacccattccaagaccagatcctgaacccatagctctccccatgtaaaatgaaggtggagggcctttctccctttcatcggatccatcactcaatccacccacaattccaacatccacaagggatacttttttaggagcagttatattgagatcaatcagtccacggcttagtgaatcagcccagacgccagacttcacctgaaaagcatcctttttaggggaaactttagagtctgctaaagatttaccagtcacattatcatgcttgccatcactgacaacattattggagggctgtgaagacacagaatcagattgagaagtaaaatcaccaaaaatatcagatccatcaaaattattaagaggaacagcagcaaagggatcgatagagctgttattcataggaacagacttctccgacttgttgtttggctgcactgccagttcaggaatggaaaacaagtcaactgtaggtgtaactgtaggaatggctggttgtgaagaaaatagatcaacctcagcctgtggttgagaaatggctcctttatccagatgaggttctgctgatacaaatgatgcatctgcaaaaagatcaacctctggtacattactagttgctggcttttctacaggaacagatgttggagcatccatgaggtcaccgattaaatcttgtccaaagagatcaacctggttagagtttccagctgaagttttggtagaagttcctcttggatcaaaatcatccatgtcatcctcagtactgtttgcaggtacacttgaactttgagaaggaactgaaccataattatttgcattagtagatgactttgatactctagatgacttgttctcctgacttttgctggcagagcgagcagaacccttcttgaaggagttctcttgattgtcactagcggtggcatggtgtgattttccttggtaatctttttcttcttcataggatcctttgtctctatagctatcattaaacctgtcaccatctctagatccaaagcctccatatttaccactgctttgaaagctgctgccactaccataagaggaggctgacccagacttgtatgtgattccactagaagaaactccaatgtacttgtcacggtttgcagcagctttatttctgacttcatgtatcttatctttatcattcaaaagtgacacaatgttttcagccttcttccttacattgagtcccacatccttcccactaggttcaacatattcaaaactagaaagtgcagagatctgaaaagtatgttctataatgtcatcaactgcacgttcagatccatgtgctaccaaatattctatgacagctaatgccttgtatacatagcgccaatcttttccagtttcacccagtcttgtccaaaggacattcatgactatttgacattcagtaaattttttggtagcctgtgaaatctctgccagcacagtaccatgaggaccccaaggttcattatcagtagcatccagcaccttctgttcgatttccggaatcttgagcaccttcagattcacctctctctttatttctcgaacggtttgatcgaagaccttcatgaaatccatggcggtggatctgatctgatccgatctgaagaggagaaaggttggaaaggggttatgcttatgttaattgcagggaattcgatggctgtagttttcagtagaaatgatttgagatctaatacattcggatcgaatttttgttttccttccaaaaattttcctcaaccctgcttctttttactcttcggaattaaatatgtttttcattcacgagaataccagtaaatttgc

SEQ ID NO: 114 - protein, 564 aa, Glycine max
MDFMKVFDQTVREIKREVNLKVLKIPEIEQKVLDATDNEPWGPHGTVLAEISQATKKFTECQIVMNVLWTRLGETGKDWRYVYKALAVIEYLVAHGSERAVDDIIEHTFQISALSSFEYVEPSGKDVGLNVRKKAENIVSLLNDKDKIHEVRNKAAANRDKYIGVSSSGITYKSGSASSYGSGSSFQSSGKYGGFGSRDGDRFNDSYRDKGSYEEEKDYQGKSHHATASDNQENSFKKGSARSASKSQENKSSRVSKSSTNANNYGSVPSQSSSVPANSTEDDMDDFDPRGTSTKTSAGNSNQVDLFGQDLIGDLMDAPTSVPVEKPATSNVPEVDLFADASFVSAEPHLDKGAISQPQAEVDLFSSQPAIPTVTPTVDLFSIPELAVQPNNKSEKSVPMNNSSIDPFAAVPLNNFDGSDIFGDFTSQSDSVSSQPSNNVVSDGKHDNVTGKSLADSKVSPKKDAFQVKSGVWADSLSRGLIDLNITAPKKVSLVDVGIVGGLSDGSDEREKGPPPSFYMGRAMGSGSGLGMGRSGFTPSQPAAGDDFFSNLGNQQHQFGGFQK

SEQ ID NO: 115 - DNA, 2338 bp, Hordeum vulgare
gaattcggccgaggctctgctcccctccctccccgcacgcgcgcgccctccgcccggcaggccgacgacctcgccgtcgaggtggccgccgtccgtcgcgagggctcgccgctcgccgggatcgggggagccgccgccgccaccgccgcgcctccatcccgtccagacgcagcctcctaggccactcgctcgtctgccactaccagctcagcgcccgacagcccagatccccccaccgtatagagtccccggccagccttcgacgccgcgccggccatggatttcatgaaggccttcgatcagaccgtaagggagatcaagagggaggtcaatctcaaggtgctcaaggtccccgagctcgaacagaaggtacttgacgcgacaagtgatgaaccttggggtccccatggctctgctctttcagagctagctcaggccaccaagaagtactctgagtgtcagatggtgatgggtgtcctctgggccaggttgggtgagcgaggtgcaaactggcgtcatgtgtataaggcactgacgattattgagtacttgatagcgaatggttctgagcgggcagttgatgacattctcgatcattattcaaagatctcggttctttcgagttttgagtttgtggaacctaatggaaaagactctggaataaatgtgaggaagaaagtggaaactctggtgggaatcatcaatgataaggagagaataaaggctgtgagagagaaagctgccagtaaccgtgacaagtacgttgggttatcatcaacagggtcaacatatagatcaagctcagcctctgtaggtagcaactacagttcaggtgaacgttatggcagttttggtggaacaagggaggctgattcgttcagtaacagttacagggacaaagaacctgttaaaacctcttcaagtaatactggcaggcgcaaatctggcagcaagataagaaaggatgcggatcatgatagaagctcatcgaagtccccatctaacacaaaaggcaatgaggatgaattcgatgactttgatcctcgtggatcttcttcaaatggtgcagctaatacaaagactgccgaggtggatcttcttggcccaaacttgatggatgatttccttgacgagcctgcagccaccccagcagaaaaaagtgctttagaacctcaggttgatctgtttgctgatgcagatttccaatcggcaaacccaggtgccgaaacagctgcgcatcaggatgtccaggaaactgttgaccttttttcgggaaatgcaacctttgcttcagcctttccaccacagactgggtttatcccaccaccaacttctgggacaccttctaatgctaatacttccgtgtccaagaacacagtacccgaaccatttgatcctttcggtgatattcctttaagcagtttcgggggatctgacccatttggtgactttagctcctctagtgcaccaccaccacctgtacacagctccactggaaatatcagcacgtcaagtcagaaccttgaggcagcatcggactttggtgcctttgaatcaaacaccgcggatacagctaaagaccccttcgacttttcttccactggcaattttggcaaagcagatgtagcacctttggcagctcccaaaactgatgcgtctgattttggtgccttcgttacaaacactgaagaagcagctaaagaccccttcaatctttcttcaagtattaatggaagggcagaccaaacacctttggcagctcccaagtccaacaccaagaaagaaaattttcaggtcaaatctggcatatgggctgactctttgagccgtggattgattgatctgaacataactggaccaaagaaggtgaacttagcagatgttggggtcgtcggcggccttagtgatgggttcgacgataaggcacagccctcatggaacatgggtatgggtgcaggggtatctggcctaggaatgtctggagttcctccttctacgcaaggcggtggcatcgagagcttggcaaactacaacaagtatcagtttggtggcttcaagtgagctcatatgagaacatttttagcacctggtgtttgttactttttgctggactgcgcctttgaatgcttattgtcttattcgttttgccacctcgcttttgttgatccggcacattccttataattgccgctgtattcaattatcgtggtatttgtccagtgttatcatgcctgtgttgtgtttgttgggtttgcagacaacccttgtgtcacaccatgattcgattcagtcttatggttaatatgtgcaccttctgtaaacggcatgccttttgctt

SEQ ID NO: 116 - protein, 594 aa, Hordeum vulgare
MDFMKAFDQTVREIKREVNLKVLKVPELEQKVLDATSDEPWGPHGSALSELAQATKKYSECQMVMGVLWARLGERGANWRHVYKALTIIEYLIANGSERAVDDILDHYSKISVLSSFEFVEPNGKDSGINVRKKVETLVGIINDKERIKAVREKAASNRDKYVGLSSTGSTYRSSSASVGSNYSSGERYGSFGGTREADSFSNSYRDKEPVKTSSSNTGRRKSGSKIRKDADHDRSSSKSPSNTKGNEDEFDDFDPRGSSSNGAANTKTAEVDLLGPNLMDDFLDEPAATPAEKSALEPQVDLFADADFQSANPGAETAAHQDVQETVDLFSGNATFASAFPPQTGFIPPPTSGTPSNANTSVSKNTVPEPFDPFGDIPLSSFGGSDPFGDFSSSSAPPPPVHSSTGNISTSSQNLEAASDFGAFESNTADTAKDPFDFSSTGNFGKADVAPLAAPKTDASDFGAFVTNTEEAAKDPFNLSSSINGRADQTPLAAPKSNTKKENFQVKSGIWADSLSRGLIDLNITGPKKVNLADVGVVGGLSDGFDDKAQPSWNMGMGAGVSGLGMSGVPPSTQGGGIESLANYNKYQFGGFK

SEQ ID NO: 117 - DNA, 701 bp, Medicago truncatula
aggctgaaatcttagatatcacagcaacagaacccatcgaatttcgcctcaattaacacaaagctacataacctttcccttcagatcagatctacacagatcaatcatcatggatttcatgaaagtcttcgatcaaaccgttcgagaaattaagagagaggtgaatctgaaggtgcttaaggttcctgaaatcgaacagaaggtgttggatgcaactgacgatgagccttggggtcctcatggtactgtgctggcagagattgcaactgctaccaaaaaatttactgaatgtcagctggttatgaatgttctttggacaagattggctgaaactggaaaggattggcgatatgtatacaaggcattagctgttatagagtatttggtatcacatggatctgaacgtgcagttgacgacattatagaacatacttttcagatctctgcactttctagctttgaatatgttgagcctaatgggaaggatgtgggactcaatgtaaggaagaaggcagaaaacattgttgcccttttgaatgatagagaaaagatacatgatattagaaataaagctgctgcaaaccgtgacaagtacgttggagtttcatctagtggaatgacatacaaatccgggaacacctcatttagtagtgggagcagtaacaaatatgggaggttttggttcaagtggtgataggttt

SEQ ID NO: 118 - protein, 194 aa, Medicago truncatula
MDFMKVFDQTVREIKREVNLKVLKVPEIEQKVLDATDDEPWGPHGTVLAEIATATKKFTECQLVMNVLWTRLAETGKDWRYVYKALAVIEYLVSHGSERAVDDIIEHTFQISALSSFEYVEPNGKDVGLNVRKKAENIVALLNDREKIHDIRNKAAANRDKYVGVSSSGMTYKSGNTSFSSGSSNKYGRFWFKW

SEQ ID NO: 119 - DNA, 2032 bp, Medicago truncatula
  misc_feature (18)..(18): n is a, c, g, or t
  misc_feature (29)..(29): n is a, c, g, or t
accacgcgggggccgcgntcttgaactantgcagcaacagaacccatcgaatttcgcctcaattaacacaaagctacataacctttcccttcagatcagatctacacagatcaatcatcatggatttcatgaaagtcttcgatcaaaccgttcgagaaattaagagagaggtgaatctgaaggtgcttaaggttcctgaaatcgaacagaaggtgttggatgcaactgacgatgagccttggggtcctcatggtactgtgctggcagagattgcaactgctaccaaaaaatttactgaatgtcagctggttatgaatgttctttggacaagattggctgaaactggaaaggattggcgatatgtatacaaggcattagctgttatagagtatttggtatcacatggatctgaacgtgcagttgacgacattatagaacatacttttcagatctctgcactttctagctttgaatatgttgagcctaatgggaaggatgtgggactcaatgtaaggaagaaggcagaaaacattgttgcccttttgaatgatagagaaaagatacatgatattagaaataaagctgctgcaaaccgtgacaagtacgttggagtttcatctagtggaatgacatacaaatccgggacaacctcatttagtagtgggagcagtaacaaatatggaggttttggttcaagtggtgataggtttagtgatagctacggagacaaggggcgctatgatgaagcaaaaatagacaaagattactcaggaaaatcacggcatggtgtctcaagtaaaaatgaagagaactccttcaaaaaaggttctgttcggtctgtcagcaaaagtcaggagaacaaatcttctagagcatcaaagtcatctgctaatgcagttccttctcaaagtgcaagtgtacctactgaggacgactttgatgattttgatccgagaggaacatctagtaagacttcagctggaagctcaaaccaggttgatctctttggacaagatttgctcggtgacttcatggatgctccaacatctgtttctgtagaaaagccagcaactagtaatgtgtcagatgttgatctctttgcggatgcatcatttgtttcagcagcaccacatgcggacaaaggagctagttctcaaccacaggatgaagtggatcttttctcttcacaaccagccattccttcagttacaccaacagttgacttgttttccattccttcaccagctgtgcagcctgacagcaagtcggaaaactctgttcctgtgaataacagcacttttgatccctttgcttctgttccacttaataattttgagggatctgatgtttttggtgattttacttctcaatctgattctgtatcttctcagccctcaacgaatgctgccaccgatggtagtacaagtggtaaatctgtaacagactctaatgtttcgcctaaaaaggatgcttttcaggtgaagtctggcatttgggctgattcactaagccgtggattgattgacctcaatatatctgctcccaaaaaaagtatcccttgtcgatgttggaattgtgggtggattaagtgatggattagatgaaagggagaaaggccctccaactacattatacatggggagagctatgggtacaggatccggtcttggtatgtatggtggcactccttcacagtcaacagctggagatgacatattttcaaacttcggtggccaaaactatcaatttggtgggttccagaagtaaaaaaattcacaaattgtatactcattccatcacattttcactcattctttgtgtgtcggctttatcaagattgctgagctttttggcatggtggattttgttaatatatatttctctctattttgtatccaagaaaggtaggaatagcaatttcctatcactattgtgattatattatcttaaattcatgctactgttgcattttaaatgtttgattacaagatccagcaaactgaagtacccaaatagcttgtgatactgcttt

SEQ ID NO: 120 - protein, 490 aa, Medicago truncatula
MDFMKVFDQTVREIKREVNLKVLKVPEIEQKVLDATDDEPWGPHGTVLAEIATATKKFTECQLVMNVLWTRLAETGKDWRYVYKALAVIEYLVSHGSERAVDDIIEHTFQISALSSFEYVEPNGKDVGLNVRKKAENIVALLNDREKIHDIRNKAAANRDKYVGVSSSGMTYKSGTTSFSSGSSNKYGGFGSSGDRFSDSYGDKGRYDEAKIDKDYSGKSRHGVSSKNEENSFKKGSVRSVSKSQENKSSRASKSSANAVPSQSASVPTEDDFDDFDPRGTSSKTSAGSSNQVDLFGQDLLGDFMDAPTSVSVEKPATSNVSDVDLFADASFVSAAPHADKGASSQPQDEVDLFSSQPAIPSVTPTVDLFSIPSPAVQPDSKSENSVPVNNSTFDPFASVPLNNFEGSDVFGDFTSQSDSVSSQPSTNAATDGSTSGKSVTDSNVSPKKDAFQVKSGIWADSLSRGLIDLNISAPKKSIPCRCWNCGWIK

SEQ ID NO: 121 - DNA, 983 bp, Physcomitrella patents
aggcagtagtagtagtagtggtagtagtaccggagtggagagggtttgcgacgcggagcgccatagccgagctcggctgagcagctatggatctgaagaaggtgttcgatcagactgtccgcgagctgaagcgggaggtcaacaagaaggtgcttaaggttcccgagattgaagtgaagatactggaggcgaccagtaacgagccatggggtccgcacggaacgataatgggtgacattgcacaggctactcggaaccacaacgactaccaaatgataatgaccgtcctttacaaacgcttgaatgacactgggaggaattggcgccatgtctacaaggctttgacggttttggagtatttggttgcaaacggctctgagagggtcattgatgaacttcaagagcatacttatcagattcagacgttgtgtgaatttcagtacttagagcaaagtggcaaggatcagggaatcaatgtacggaagaaggcacaaactttggttgccttaatcaaggataaagataagattcgtgaagtgagaagcaaggcagcagccaaccgagacaaatatcgtggcgtctccagcactggaatgacacatcgttctagttcctattcaagcaccggaggaggttatggtgatagggacgatgaccggtatggaggaagccgtggaggaagagatgaatatgattacagtgggagaggcggcggccgagatgctgatcggtacagggatgatgatccttacggaggaggtagagagcgaagcaggaatagtagttacgatggtcgtgatgcatctaaggaacgtgatgcttatggatcgaagggaaatgacagttatccgtcaaaaggaggtgatcgagatggttatgcctcaaagggaggtgatcgttatgagaagtacgagagtggatctgtaagtgaccgcgaccgtgatagagggtacgatgacgacgacagttattcttccaggtga

SEQ ID NO: 122 - protein, 298 aa, Physcomitrella patents
MDLKKVFDQTVRELKREVNKKVLKVPEIEVKILEATSNEPWGPHGTIMGDIAQATRNHNDYQMIMTVLYKRLNDTGRNWRHVYKALTVLEYLVANGSERVIDELQEHTYQIQTLCEFQYLEQSGKDQGINVRKKAQTLVALIKDKDKIREVRSKAAANRDKYRGVSSTGMTHRSSSYSSTGGGYGDRDDDRYGGSRGGRDEYDYSGRGGGRDADRYRDDDPYGGGRERSRNSSYDGRDASKERDAYGSKGNDSYPSKGGDRDGYASKGGDRYEKYESGSVSDRDRDRGYDDDDSYSSR

SEQ ID NO: 123 - DNA, 690 bp, Physcomitrella patents
atggatctaaagaaagtgttggaccaaacggtccgagaatttaagagggaagtgaacaagaaagtcctcaaggtgcctgaaattgagctcaaagtttgcgaggccacgagcaatgagccctggggaccgcatggagcaatcatgggtgatatcgcacaagcgactcggaacttccaagactatcacatgattatgggggttttgtggaagcgcttgcacgactctgggaagaattggcgacacgtctataagtcactagcagtgatggagtacctcattgccaatggagctgagcgagtaattgatgaactgcgggagcaggcttaccaaatccaggttttactggatttccaacacattgagcccaacggcaaagatcagggtatcaatgtgaggaaaaaggcagagagcctgttggcgctgatcaatgaccctggcaagattcgtgaactacagcaaaaggctgctgctaacagagataagtatcgaggcctctctaatacggggatgagcttcaagccaagttcgtatttaagcacaagcggtagctacagcgacaaagaaaacgagcggtatgggggaggctcgagcgtgaatgcacaaaaggatgatgaagtccacaaggaagatcagcgagaatccaacaggtcagagtactggcaaaaagtgacgcttgcaggctgtaattaa

SEQ ID NO: 124 - protein, 229 aa, Physcomitrella patents
MDLKKVLDQTVREFKREVNKKVLKVPEIELKVCEATSNEPWGPHGAIMGDIAQATRNFQDYHMIMGVLWKRLHDSGKNWRHVYKSLAVMEYLIANGAERVIDELREQAYQIQVLLDFQHIEPNGKDQGINVRKKAESLLALINDPGKIRELQQKAAANRDKYRGLSNTGMSFKPSSYLSTSGSYSDKENERYGGGSSVNAQKDDEVHKEDQRESNRSEYWQKVTLAGCN

SEQ ID NO: 125 - DNA, 3285 bp, Physcomitrella patents
atgccacgttctgagctgggggtgaaggcaaaacgaggtcaagacccaggaattcctgcagcatgggtcgtgccaggaatagaagcggcgaggagcgctgttgcggtgcaagctggccatgaagaatcgctccgccctctagaaccatcacaactttgcagcttgcgacgggatcgactgggagcggtaatgactgattcatcgacctcattattgtcgcaacgcatccgtcgcggttttggcagcccatccgcacgccggacggaaggaagcttgggctgcgtcttcggggatggaagtcggtctcgacgcgctttgaatccggtggaattttggggttgtgcgggaagaagagcttcgtctgtagctgagctcgggtgcgcagctatggatctgaagaaagtgtttgatcagaccgtccgggagctgaagcgagaggtcaacaagaaggtgcttaaggttcccgagattgaagtgaaggtggtcgttctacatgtggatgtgaataagcgtcgcaatgctacgttggcagagctagcatgcaccttttactgcactaattaccttcttttctacaagactaaaaacgagacattcaaggattctgcaaggcagagagagatagtgggctgtacatctgttcttttcgaggtccatgtagaggggatttatatggtgttggaggcaaccagcaacgagccttggggtcctcatggatcgatcatgggagacattgcgcaggcttctcgaaattacaatgactaccaaatgataatggctgtcctgtacaaacgcctaaatgacactgggagaaattggcgccatgtgtacaaggctttgacagttttggaattcttgattgcaaatggcgcagagagggtcatcgatgaacttcaagagcatacttatcagatccagacattgtgcgattttcaatacctagagccaagtggcaaggatcagggaattaatgtacggaagaaggctcagactctggtagctttgatcaaagataaagatagaatccgagaagtgagaagcaaggcggctgccaatcgtgataaatatcgtggagtctctagcaccggaataactcaccgctcaagttcttattcaagcactaggggaagttatggtcatagggatgatgagcggtatggaggaagccgtgggggaagagacgaatatgattacactgggaggggcagtggccgagatggtgatcggtatagggacgaggatccttacggaagagatagggagcgaagtagagatagtagttacgatgggcgcgatgcatctaaagagcgtgatgcttatgggtccagggcaggtgatagttattcgtcgaaaggtggtgatcgcgatggttacggctcaaaggcaggtgatcgttatgataagtacgagagcggatctgcaagtgatcgcgaccgtgaaaggggttacgatgacgacgatagctactcttctaggaatggcaagtcgaaaggcggatctacaccacctcctgcttacgaggaagcggttcagaggcttgcttccgacgtagatagtaacgagggccaaggtgtggctgcagcggtggcaaaagctttcagcagtcaggaagaggctactgtgctcaccgcatcagagatcgtgccaaaaccaagtgcaaattgctcttttgatgcaagccaaacggcagacgatgattttgatgattttgaccctcgcggaaccagccactcagcttctgcctctacagcaagtcagccaacggagaatttctttccagaatcaggaaatctatctttattccccgattcaacttctgcaccccctgcacctcctgcacaagcacaacttcctccagcagcgcaaaaaagtttaggtggccttgaagacctattcggtggtagttttgatgtagctcctgtttcaacttctgttaccactcccgccccagcgcctcccaatttcttctcgaacaacgcggtgcaagcaaatgatttgtttggagattcattttctgtgactccttctagtgcatctgatgggttcggagcttcagcttttcaatccactccagcttctgctgcccctgcagtagcttcggacccgtttggtggatcgtcgttccaactgggccctccacccccaccccctcctgtttatcaaccgccagctgcccctgctagcaacttcggaaataactccttccagagtcatggtgcaccaggagtgcccaatggtttgaatgcaaatatgttcgggcacccatcgactccatttgacccggctactaacaacaatggattttctcatatatccgggcaaagctttggcaacaaccagagtttccctcgaaatcaatcgttcagcggcatgacccaagcatccagtgtaaatcaatcctattatggagcctcacagaatatgggtggcataaatagatccgcttcagcgccacaagaattacagcacttggaacaaccaccaaaaccacagcaaccagctagaaaggaattcggaccagtgaagtctgccatttggggagacacacttagcatgggccttgttgatctcaacatcgcaggaccgaaagtaaatcctctaaacgacctcggaattcagttgacagaccctactctaaagaacgagctttggggtgccgacaacccgaagcaagcccaaaaaaagcctgcatcgtcatctgggatggggatgggacagcctatgggtaaagctatgggatccggcactggccttggtagagcaggggccagtggactacctcctcctatgcctgcgaccacaatggcaagaccaggtatgggcatgggtcctcaacaggctggtgccatgaacttcaacatgggcatgggcatgggcatgggttctaatataggcatttcgccgggcatgagtatgggtcctcagatgggaacgggtatgaaccagatgggatcaatgttacatatgggtatgggaggctacccaaaccaacagcaacagtatggctatagtaaaacgctttggcaaaatttaacccctgattccatagtccattgcggtggacatgtatttgtctttacaggaccagttacgctttcatgcgtccgtgcctacatgccgacattcttggtcagatccagctcttgtgttgtggtggtctttgttactatcactttctttccttaccactctcactggtggctttttgaattccctttcgtcagctcagtaaattctgattatatcccaggcacaattcctggtcattctctttattggttctga

SEQ ID NO: 126 - protein, 1094 aa, Physcomitrella patents
MPRSELGVKAKRGQDPGIPAAWVVPGIEAARSAVAVQAGHEESLRPLEPSQLCSLRRDRLGAVMTDSSTSLLSQRIRRGFGSPSARRTEGSLGCVFGDGSRSRRALNPVEFWGCAGRRASSVAELGCAAMDLKKVFDQTVRELKREVNKKVLKVPEIEVKVVVLHVDVNKRRNATLAELACTFYCTNYLLFYKTKNETFKDSARQREIVGCTSVLFEVHVEGIYMVLEATSNEPWGPHGSIMGDIAQASRNYNDYQMIMAVLYKRLNDTGRNWRHVYKALTVLEFLIANGAERVIDELQEHTYQIQTLCDFQYLEPSGKDQGINVRKKAQTLVALIKDKDRIREVRSKAAANRDKYRGVSSTGITHRSSSYSSTRGSYGHRDDERYGGSRGGRDEYDYTGRGSGRDGDRYRDEDPYGRDRERSRDSSYDGRDASKERDAYGSRAGDSYSSKGGDRDGYGSKAGDRYDKYESGSASDRDRERGYDDDDSYSSRNGKSKGGSTPPPAYEEAVQRLASDVDSNEGQGVAAAVAKAFSSQEEATVLTASEIVPKPSANCSFDASQTADDDFDDFDPRGTSHSASASTASQPTENFFPESGNLSLFPDSTSAPPAPPAQAQLPPAAQKSLGGLEDLFGGSFDVAPVSTSVTTPAPAPPNFFSNNAVQANDLFGDSFSVTPSSASDGFGASAFQSTPASAAPAVASDPFGGSSFQLGPPPPPPPVYQPPAAPASNFGNNSFQSHGAPGVPNGLNANMFGHPSTPFDPATNNNGFSHISGQSFGNNQSFPRNQSFSGMTQASSVNQSYYGASQNMGGINRSASAPQELQHLEQPPKPQQPARKEFGPVKSAIWGDTLSMGLVDLNIAGPKVNPLNDLGIQLTDPTLKNELWGADNPKQAQKKPASSSGMGMGQPMGKAMGSGTGLGRAGASGLPPPMPATTMARPGMGMGPQQAGAMNFNMGMGMGMGSNIGISPGMSMGPQMGTGMNQMGSMLHMGMGGYPNQQQQYGYSKTLWQNLTPDSIVHCGGHVFVFTGPVTLSCVRAYMPTFLVRSSSCVVVVFVTITFFPYHSHWWLFEFPFVSSVNSDYIPGTIPGHSLYWF

SEQ ID NO: 127 - DNA, 2792 bp, Populus trichocarpa
cagtactgcccttcaactcgtcctccgacaatgaagaaggcctttgatcaaactgtcagggacatcaagagagaggttaataagaaagtgctcaaagttccttcgatagaacagaaggttcttgatgctaccagtaatgagccttggggtccgcatggaacacttcttgcagatattgcacaggcatctagaaattatcatgaatatcagatgatcatggcagttttatggaaacggcttaatgataccggcaggaattggcggcatgtctacaaggcgttgactgttttggaatatctggttgctcatggatcagagcgtgtcatagatgagataagggaacattcatatcaaatatcgacattgtcaaatttccaatatattgactccagtggaaaggaccagggtaataatgtcaggaagaaatcccagagtcttgtggccctggtgaatgataaagaaaggataattgaagttagacagaaggctgctgctaacagggacaagtttcgcacatctcctggtggaatgtatagacctggctcttattcaagtacaggggggtatgatgacgatggtcgctataaggatgaggatcgaaatggatatggttatggcaaagaaagagaatacaattatagggatgatgaccggtatggtaaatacggggattcgtatggtcgtgatgctgatcgttacggtgaagaacggtatggcagagatggatatagggatgatgactatcagggaagaagtcgaagcattgatggttatgggtcaagaagcaggagctccgacagagatagagatcgggcttttgatgacgatggtcaatcctcatctcgcggcagtggtgctagagctgatgatcgggctcaggatggaaggcggcttgagcgaaaaccttccgagcaaaatattggtggtcctcccagctatgaagaaactataagtgaatcccgaagccctgctcacagtgaaaggaatggggaaactttagcagcacctgctcctggagcttctccacctccaagcaatcctggacaagcaaacacttttgatgtgaggtctccatctcctgcagaccgggaaattgaggtggctgatgaatttgatccacgtggtcctgtttcagcttcccccacagcaacatctgttccaactgcctctgctttccctaccacctcaaacaatgctgaaatggatttactcggctctttatcagatgtttttgctccaaatccattggccattgtgccagtcacttctgcaacatcatcctctgaagctgatgcccaggcaaacttttctggatccacttttgcttcaacacaatcagcctctaatattatgaaccaggctttcgaagatccatttggtgataatccttttaaagctactcctacagacaatttctcagcccaacagccaactgcttcggctgcccctttccagcctactatgaatcaaaatgctgaaatgccccatgcagctgcaccaccaaatggtgatgcattctctgacatgacttattcagcacccaatgttcaacctccttcaacaaactcacacttttttcctcaagaaatgtcaagttctcatccagaaactgatattctggcagacattctctcatcatccggtccttatgctgcagcctcacaggcaggtttttcatttccttctggccaacctccacagttaggggctagcatgtacgggaacttcaatccaccagcagggaatatggtaccgccagcagttccacacatggctcctcagacccaacaattaagcagtgcaaacttccttccacagggaggattcccagctactaacccttccaacatggctctacaacctccagctggaccagtggcacattttaacaatggaaactttccacaacaaggttctgcagccccagttgtccctcaattttctcaccatacactgactggatcaaccccacaatttaacagtggaaactttcacccacaacgtggctctacagtcccagtttcttcacaatttacttaccaaactccaaccgcttcatctcctcaacagaaagatgtcctgggtaatttgttttctcaaggatcgaactcttccatgtcatctcagacagctcttccatcttcaacagggtcgcttgctatagttcctctaccatccaaagacaaatttgagaccaagtcaacagtgtgggcagatactatgagtagagggctggtcaatttgaatatttctggacctaaaaccaatccattggctgacattggagttgattttgatgcccttaatcgcaaggaaaagagaatggaaaaacagcccatgactccagttacatctactgtcaccatgggcaaagctatggggtctggtactgggatgggccgacctggtgcaggtgttctcagcccacctccaaaccctatgattggttctggtatgggaatgggtgtgggtgcgggcgtgaatatgggcattggtatgggtggtcgtcctggttcaggcattggcatgggaggttatggaggagtgcaccagcccatgggtgtgggtgtgggtgtgggaatggggatgatgaacatgggaatgatgccaggtggccagatgcctcctggatcagccatgcctggtggctataaccccatgatgggttctggtggttacactccccaacaacattatggcggatatcgatgagatggatcaaccatactgaagggcaacgaatacctgttgatttttggaggtaaaaggggatggcattgctaaccccaagt

SEQ ID NO: 128 - protein, 893 aa, Populus trichocarpa
MKKAFDQTVRDIKREVNKKVLKVPSIEQKVLDATSNEPWGPHGTLLADIAQASRNYHEYQMIMAVLWKRLNDTGRNWRHVYKALTVLEYLVAHGSERVIDEIREHSYQISTLSNFQYIDSSGKDQGNNVRKKSQSLVALVNDKERIIEVRQKAAANRDKFRTSPGGMYRPGSYSSTGGYDDDGRYKDEDRNGYGYGKEREYNYRDDDRYGKYGDSYGRDADRYGEERYGRDGYRDDDYQGRSRSIDGYGSRSRSSDRDRDRAFDDDGQSSSRGSGARADDRAQDGRRLERKPSEQNIGGPPSYEETISESRSPAHSERNGETLAAPAPGASPPPSNPGQANTFDVRSPSPADREIEVADEFDPRGPVSASPTATSVPTASAFPTTSNNAEMDLLGSLSDVFAPNPLAIVPVTSATSSSEADAQANFSGSTFASTQSASNIMNQAFEDPFGDNPFKATPTDNFSAQQPTASAAPFQPTMNQNAEMPHAAAPPNGDAFSDMTYSAPNVQPPSTNSHFFPQEMSSSHPETDILADILSSSGPYAAASQAGFSFPSGQPPQLGASMYGNFNPPAGNMVPPAVPHMAPQTQQLSSANFLPQGGFPATNPSNMALQPPAGPVAHFNNGNFPQQGSAAPVVPQFSHHTLTGSTPQFNSGNFHPQRGSTVPVSSQFTYQTPTASSPQQKDVLGNLFSQGSNSSMSSQTALPSSTGSLAIVPLPSKDKFETKSTVWADTMSRGLVNLNISGPKTNPLADIGVDFDALNRKEKRMEKQPMTPVTSTVTMGKAMGSGTGMGRPGAGVLSPPPNPMIGSGMGMGVGAGVNMGIGMGGRPGSGIGMGGYGGVHQPMGVGVGVGMGMMNMGMMPGGQMPPGSAMPGGYNPMMGSGGYTPQQHYGGYR

SEQ ID NO: 129 - DNA, 2846 bp, Populus trichocarpa
cattgccgttcttcaactattctgctgataatgaagaaggtctttggtcaaactgtcagggacttcaagagagaggttaataagaaagttctcaaagttccttcgatagagcagaaggttcttgatgctaccagcaatgaaccttggggtccacatggatcactgcttgcagatattgcgcaggcatcaagaaattatcatgaataccagatgatcatggcagttctctggaaacgaattaatgatactgggaagaattggcggcatgtctacaaggctttgactgttttggaatacctggttgctcatggatcagagcgtgccatagatgagattagggaacattcttatcaaataacgacattgtcagatttccaatatattgattccagcggaaaggaccagggtaacaatgtcaggaagaaatcccagagccttgtggtcctggtgaatgataaagaaaggatagttgaggctagacagaaggctgctgctaacagggacaagtttcgcaacgcatcacctggtggaatgaatagacctggttcttatgatgatgacggtcgctatggaaacagggatgaagatcgaaatggatatggttatggcaaagaaagagaatacaattatagggatgatgaacggtatggtaaatatggggactcgtatggtcgtgatggagatcataatggtgaagaacggtatggtagggatggatatagggatgatgactatcagggaagaagccgaagcattgatgattacggttcaagaagcaggagctctgatagagatagagatcatgcttttgatgatgatggtcaatcctcatctcgtggcgctagagctgatgatcagtctcatgacggaagcattgctaagcggcttgagcgaaaattttctgagcaaaatattagtggtccacccagctatgaagaagccttaagtgaatcccgaagccctgctcacagtgaaaggaatggagaagctttagcagtacctgctcctgtagcttcttctccaccagctcctagatctttctctccacctgcttttaatgctgcttctccacctccaagcaatcctggacaagaaaacactttttttgcgacgcctgcatctcctgcagaccaggaagttgtggtggctgatgaatttgatccacgtggtcctatttcagctccccctactgccacatctgttcaaactgcctctgctttcactccgacttcgaacaatgctgaaatggacttacttggctctttatcagatgtgtttactccaaatccattagccatcatgccagttacttctgcaacaactacctctgaagctgattctcaaacaaacttttcaggatccatgtttgctgcaacacaatcaccatcaaatgttatgaatcaggcttttgaagatccatttggtgactctcctttcaaagctactcctacagatgctttctcagctcaacagcccactgcttcttctgcccctttccagcctaccatgaatcaaaatacagaaatgcccaatgcagtagcaccaccaaatggtgacacattctctgccatgacttattcagcacccaatgttcaacctccttcaacaaatccacactttttgcctcaagaaatgtcaagttctcatccagaaactgatattctggcagacatcctcccaccatctggtccatctgctgtagcttcacaggcaggtttttcacttccatctggccaacatccacagccaggtgctagtgtgtatgggaacttcaattcaccaccagggaatatggtattgctggcagctccacacatggctcctcagggccagcaattaagcagtgcaaacttctttacacagggaggatccccagctcctatccattccaacatgtctctacaacctccggctgggccagtggtgctgtttaataatggaaacttagttccacaacaaggttctacggctccagttgtctcacaattttctcatcatacaccgactggatcagcaccacaatataacagtggaaactttctcccacaacatggctctactttcccagtcgcgtcacaatttacttaccaaactccacctgcttcatctcctcaacataatgatgtcctgggtaatttgttttcacaagggccaaacacttccatggcttctcagacagctcttccatcttcaacagggtcgcttgctatagttcctcaaccatccaaggacaaatttgagactaagtcaacagtgtgggcagatactctgagtagagggctggtcaatttgaatatttctggacctaaaaccaatccattagctgacattggagtcgattttgatgcccttaatcgcaaggaaaagagaatggaaaaacagcccatgactccagttgtatctactatcaccatgggcagagctatgggatctggtactgggttaggccgagctggtgcaggtgttctcaggccacctccaaaccctacgattggttctggcatgggaatgggtgggggtgtgaatatgggcatgggcatgggtatgggtggtcctggttcaggcattggcatgggaggttatggaggaatgcaacaacccatgggtggtgtgggtatgggagcagggatgaatgcgggcatgaatatgggaatgatgcaaggtggccagatgcctcctggatcggccatgcctggtggatataaccccatgatgggctctggtggttacccgtcccaacaaccctatggtggtggatatcgatgagatggagctgccttgttgatgtgttagtatacctgctgattttacaaggtaaaagggatggcatcgcaaacccagtgtta

SEQ ID NO: 130 - protein, 911 aa, Populus trichocarpa
MKKVFGQTVRDFKREVNKKVLKVPSIEQKVLDATSNEPWGPHGSLLADIAQASRNYHEYQMIMAVLWKRINDTGKNWRHVYKALTVLEYLVAHGSERAIDEIREHSYQITTLSDFQYIDSSGKDQGNNVRKKSQSLVVLVNDKERIVEARQKAAANRDKFRNASPGGMNRPGSYDDDGRYGNRDEDRNGYGYGKEREYNYRDDERYGKYGDSYGRDGDHNGEERYGRDGYRDDDYQGRSRSIDDYGSRSRSSDRDRDHAFDDDGQSSSRGARADDQSHDGSIAKRLERKFSEQNISGPPSYEEALSESRSPAHSERNGEALAVPAPVASSPPAPRSFSPPAFNAASPPPSNPGQENTFFATPASPADQEVVVADEFDPRGPISAPPTATSVQTASAFTPTSNNAEMDLLGSLSDVFTPNPLAIMPVTSATTTSEADSQTNFSGSMFAATQSPSNVMNQAFEDPFGDSPFKATPTDAFSAQQPTASSAPFQPTMNQNTEMPNAVAPPNGDTFSAMTYSAPNVQPPSTNPHFLPQEMSSSHPETDILADILPPSGPSAVASQAGFSLPSGQHPQPGASVYGNFNSPPGNMVLLAAPHMAPQGQQLSSANFFTQGGSPAPIHSNMSLQPPAGPVVLFNNGNLVPQQGSTAPVVSQFSHHTPTGSAPQYNSGNFLPQHGSTFPVASQFTYQTPPASSPQHNDVLGNLFSQGPNTSMASQTALPSSTGSLAIVPQPSKDKFETKSTVWADTLSRGLVNLNISGPKTNPLADIGVDFDALNRKEKRMEKQPMTPVVSTITMGRAMGSGTGLGRAGAGVLRPPPNPTIGSGMGMGGGVNMGMGMGMGGPGSGIGMGGYGGMQQPMGGVGMGAGMNAGMNMGMMQGGQMPPGSAMPGGYNPMMGSGGYPSQQPYGGGYR

SEQ ID NO: 131 - DNA, 1829 bp, Populus trichocarpa
aatcagacgccaccgatttgcagatccatcatggatttcatcaaagtctttgatcaaacagtccgcgaaataaagagagaggtcaatctcaaggtcttgaaggttcctgaaatcgaacaaaaggtgttggatgccactgatgatgcaccttggggtccacatggctctgcaatggctgagatcgcgcaagctactaaaaaattcacggaatgtcaaatgatcatgaatgtcctgtggacgaggttaggtgagacgggcaaggactggcgtcttgtttacaaggcattggctgtcatagaatatttggtggcacatggatctgatcgtgctgttgatgacataatagaacacacattccagatatcatccctcacaagtttcgaatatgttgagccaaacggaaaggactcaggacttaatgtgaggaagaaggctgaaactattgtatcccttttgaacaataaggataaaatatacgaagtcaggagtaaggctgctactaaccgtgataagtatgttggtctttcatctagtggaatatcttataagtcaagcacagcctcatttggaagcagcagcagcagcttccaaagtagagatcggtatggaggtggcttaagtggtacgggagatgaagatagctatgatagttttaaacaagaaaagagtcgaaaggattcctacacgaagtcacatcgaaggggtataagtgacaatcaagacagcaccttgaaaaagggttctgcaggctttggaagcaaggatcaagataatttgtcttctcgtgcatcaaggtcatctgctaacctaaatgcctctgataagaaaaactcagtttcaagtaattatgatgacgatgattttgatgattttgatccccgaggaacctccagcactaagtctgcttctcaaacctcaaaccaagttgatttgtttggagaaagtttgattggtgatctcatggatgcacctccatctgttcctacagaagctttagtcatgaatgggaattctgcagaggttgatctgtttgctgatgcagcttttgtatcagcacctccccaagctggaaaggaagcaagttcacagactcagacaaaggttgatctgttcacttcccaacctgccaacccttctgcagttccttctacatttgacttcttttctagtgatgaaccagtcgcacaacccgggatcaagactccaaaatctgatcctccaaatactaatgtctttgacccatttgctgcagttccaatgaacaattttgatggatctgatctttttggtgtattcacttctagttctaatccagcttcttcagaaccaactcaaagtcctattaaagatggcagccttgacaatttggatgggaagtctttggcaagctccaatcctccacagaaggagggtttccaggtgaagtctggaatatgggcagattcgcttagccgtggactgattgatcttaatatatctgctcgctcagtcagaattgtcttgccacttgaactccttgcagccaagaaggtgtctcttgtagatgttggtgtcgtgggtgatcttactaatggattagatgaaagggaaaagggacctccaacttcattctatatgggaacagcgatgggcatgggatctggccttggtaaatccgggttaacagcttcacagtcacaagcaactggcggagatgatttcttctcaagccttggtggccaacaataccactttggtaattttaagtaaattctgtcaagtggcctttatcgcccattatgcccgcatattcttttgcccgtttggtaaagatatttcaagtgctgcct

SEQ ID NO: 132 - protein, 572 aa, Populus trichocarpa
MDFIKVFDQTVREIKREVNLKVLKVPEIEQKVLDATDDAPWGPHGSAMAEIAQATKKFTECQMIMNVLWTRLGETGKDWRLVYKALAVIEYLVAHGSDRAVDDIIEHTFQISSLTSFEYVEPNGKDSGLNVRKKAETIVSLLNNKDKIYEVRSKAATNRDKYVGLSSSGISYKSSTASFGSSSSSFQSRDRYGGGLSGTGDEDSYDSFKQEKSRKDSYTKSHRRGISDNQDSTLKKGSAGFGSKDQDNLSSRASRSSANLNASDKKNSVSSNYDDDDFDDFDPRGTSSTKSASQTSNQVDLFGESLIGDLMDAPPSVPTEALVMNGNSAEVDLFADAAFVSAPPQAGKEASSQTQTKVDLFTSQPANPSAVPSTFDFFSSDEPVAQPGIKTPKSDPPNTNVFDPFAAVPMNNFDGSDLFGVFTSSSNPASSEPTQSPIKDGSLDNLDGKSLASSNPPQKEGFQVKSGIWADSLSRGLIDLNISARSVRIVLPLELLAAKKVSLVDVGVVGDLTNGLDEREKGPPTSFYMGTAMGMGSGLGKSGLTASQSQATGGDDFFSSLGGQQYHFGNFK

SEQ ID NO: 133 - DNA, 802 bp, Solanum lycopersicum
  misc_feature (786)..(786): n is a, c, g, or t
aaaaaacagagtagctatttctctcttctcttggcaaagcaagagttgagagagatctcatcggctttatactttttgaagagatctcatccttttttcctttcagtttcagatctctatatctttttccagaattttgaatcaggtttcgcttattgggtagattcagccatggatttcatgaaggtcttcgatcaaacggttcgcgaaataaagagggaggtgaatttgaaagtattgaaagtccctgagatcgagcagaaggtattggatgctactgatgatgagccctggggccctcatggtactgctttggctgagatagcacaggctacaaaaaaattctccgagtgtcagatggtcatgaatgtgctctggacaagattgactgaaactggaaagaactggcgatatgtctataagtcattggctgttatagagtacttggtggcgcatggagctgaacgtgcaattgatgacatcatagaacatacctatcagatctcttctctcacaactttcgagtatgttgagccaaatggtaaggatgtgggaattaatgtgaggaagaaggcggaaaatgttgtggcattattaaataacaaagagaagatacaagaggttaggagtaaagctactgcaaatcgtgagaagtacgttggactatcatcttccggaataacatataaggcaagctctgcctcttttagtagcagcagaagcggcttacagagtagtgaacgggtatggaggttttggaaataaaagcgatggtgattcatttanggatagttataatgaa

SEQ ID NO: 134 - protein, 197 aa, Solanum lycopersicum
MDFMKVFDQTVREIKREVNLKVLKVPEIEQKVLDATDDEPWGPHGTALAEIAQATKKFSECQMVMNVLWTRLTETGKNWRYVYKSLAVIEYLVAHGAERAIDDIIEHTYQISSLTTFEYVEPNGKDVGINVRKKAENVVALLNNKEKIQEVRSKATANREKYVGLSSSGITYKASSASFSSSRSGLQSSERVWRFWK

SEQ ID NO: 135 - DNA, 1754 bp, Triticum aestivum
ccacgcgtccgcggacgcgtgggcggacgcgtgggcggacgcgtgggcggacgcgtgggcgcgcgcgccctccgcccggcaggccgtcgacctcgccgtccgtcgaggtggccgccggccgtcgcgaggaatcgccgctcgccgggatcgggggagccgccgccgcgtctccatcccatccagacacagcctcctaggccactcgctcagcgctcgagagcccagatcccccgctatatagagtccccgtcgacccttcgccgccgcgcaggccatggatttcatgaaggccttcgatcagaccgtaagggagataaagagggaggtcaatctcaaggtgctcaaggtccccgagctcgaacagaaggtccttgacgcgacaagtgatgaaccttggggtccacacgggtctgctctttcagagctagctcaggccaccaagaaatactctgagtgtcagatggtgatgggtgtcctctgggccaggctgggtgagcgagatgcaaactggcgtcatgtgtataaggcactgacgattattgagtacttgatagcgaatggttctgaccgggcagttgatgacattctcgatcattattcaaagatctcggttctttcgagttttgagtttgtggaacctaatggaaaagactctggaataaatgtgaggaagaaagtggaaactctggtggggatcatcaatgataaggagagaataaaggctgtgagagagaaagcggctagtaaccgtgacaagtacgttgggttatcatcaactgggtcatatagatcaagctcagcctctggaggtagcaactacagttcaggtgaacgctatggcagttttggtggcacaagggaggctgattcgttcagtaacagttacagggacaaagaacctgttaaaacctcttcaagtaatactggcaggcgcagatctggcagcaagataagaaaggacgcggatcatgatagaagctcctcgaagtccccatctaacacaaaaggcaatgaggatgaatttgatgactttgatcctcgtggatcttcaaatggtgcagctaatacaaagactgccgaggtggatcttctcggcccaaacttgatggatgatttccttgacgagcctgcagccactccagcagcaaaaagtgctgtagaacctcaggttgatctgtttgctgatgcagatttccaatcggcaatcccaggtgccgaaacaactgcgcatcaggatgtccaggaaactgttgaccttttttcgggaaatgctacctttgcttcagcatttccaccacagactgggtttatccaaccaccaacttctgggacaccttctaatgctaatacttccgtgtccaagaacacagtacctgaaccatttgatcctttcggtgatattcctttaagcagttttgggggatctgacccatttggtgacttcagctcatctagtgcaccaccaccacctgtacacagctctactggaaatatcagcacgtcgagtcagaaccttgaggcagcatcggactttggtgcctttgaatcaaacaccgtggatacagctaaagaccccttcgacttttcttccactggcaattttggcaaagcagatgtagcacctttggcagctcccaaaactgatgcgtctgactttggtgccttcgttgcaaacactgtataagcaactaaagacccctgtgatctttcttcaagtattaatggaagggcagaccaaacacctttggctgctc

SEQ ID NO: 136 - protein, 469 aa, Triticum aestivum
MDFMKAFDQTVREIKREVNLKVLKVPELEQKVLDATSDEPWGPHGSALSELAQATKKYSECQMVMGVLWARLGERDANWRHVYKALTIIEYLIANGSDRAVDDILDHYSKISVLSSFEFVEPNGKDSGINVRKKVETLVGIINDKERIKAVREKAASNRDKYVGLSSTGSYRSSSASGGSNYSSGERYGSFGGTREADSFSNSYRDKEPVKTSSSNTGRRRSGSKIRKDADHDRSSSKSPSNTKGNEDEFDDFDPRGSSNGAANTKTAEVDLLGPNLMDDFLDEPAATPAAKSAVEPQVDLFADADFQSAIPGAETTAHQDVQETVDLFSGNATFASAFPPQTGFIQPPTSGTPSNANTSVSKNTVPEPFDPFGDIPLSSFGGSDPFGDFSSSSAPPPPVHSSTGNISTSSQNLEAASDFGAFESNTVDTAKDPFDFSSTGNFGKADVAPLAAPKTDASDFGAFVANTV

SEQ ID NO: 137 - DNA, 947 bp, Triticum aestivum
tcccgggtcgaccagcggcagtccgatccgccgccgctcgtcccgcctcctcacccaggtctcctaccgaggaggaggaggaggaggagcaggaggaggggaggctgacacccgggtgcgcgcagggggctagctagattcggaagggcgccatgaagaaagtgttcgaccagacggtccgggacctgaaacgcggggtgaataaaaaggtcctcaaggtgcctggcacggaacagaagattctcgacgccacaagcaatgagccgtggggcccccatggatccctcctggcggagatcgcccaagcaacacataactatcatgagtatcagatgatactgaatatcgtgtggaagagggtcagcgatactggtaaaaattggcggcatgtgtacaagggattgattgtcctagattacctggtagcacatggaaccgagcgagttattgatgacataagggagcattcttatcagatatcggcactagctgacttccagtatatcgattctagtgggagagatcaaggtagcaatgtacgacggaaatcccagagcctcgttagtttagttaatgataaggaaaggatactggaagttaggcagaaagcacttgctaccagagacaagtatcggagtgcatttgccacaagtggaccacacaggagtccgggtggatatgacaatgaccgatcgctacgaaggaggtagatatgataacaggaatggctatgggagggaacgagacggatatagagatgatgacagatacagtggcgctggagatacacccaatagggatggagatcaatattctagggattctaatgaacgcaacagggaagatgaatacaacagaggaagtaatagcaaccctgagtatgcagaaggatcaggccgtaggagctacggggatgaggaggcttattcatcccgtggtcgtggcag

SEQ ID NO: 138 - protein, 185 aa, Triticum aestivum
MKKVFDQTVRDLKRGVNKKVLKVPGTEQKILDATSNEPWGPHGSLLAEIAQATHNYHEYQMILNIVWKRVSDTGKNWRHVYKGLIVLDYLVAHGTERVIDDIREHSYQISALADFQYIDSSGRDQGSNVRRKSQSLVSLVNDKERILEVRQKALATRDKYRSAFATSGPHRSPGGYDNDRSLRRR

SEQ ID NO: 139 - DNA, 1683 bp, Arabidopsis thaliana
atggatttcatgaaggtcttcgatcaaactgttcgagagataaaaagggaggtgaatctgaaagttttgaaggtccctgagatggagcaaaaggtattggatgctacagataatgagccttggggtccccatggtactgcattggcagagatagctcaggccacgaagaaattctcggagtgccagatggttatgagtgttttgtggactagactaagtgagacaggaaaagattggcgatatgtctacaaggcattggctgttattgattatctgatttcgaatggatcagaacgagcggttgatgagattattgagcatacttaccaaatatcttcactcacaagttttgagtatgttgaaccaaatgggaaagatgtgggaatcaacgtgagaaagaaggcggaaaacatagtcgctcttttaaataataaagagaaaatctcagaaatcagagacaaagcagtagcaaatcgtaacaagtatgttggcctctcatcaacgggaataacatataaatctggttcctcagcttcatttggtggtagttttcaaagtggttcaagcaattttgacagctacaaggatagagattccagagaagacaagaatgactacgagtcttttcaaaagtcaagacgtggtgttaaaactgaggagcaaagctacacttctaagaagagtttttcacgctatggcagcacggaccatgacaatctatccagtggtaaaaagtcacccgattctgccaaacataggtcatatgtatctgcagctccttcaaacaacgatgatgattttgatgattttgatccacggggaacttccagtaataagccatccacaggcagtgccaaccaagtggacctttttggaggagatctgattggtgacttcttggattctgggccaacagaaacatcttccaccaacaacaacgagaactttcaagaggcggacttgtttgctgatgcagcttttgtatcagcctcggctcagggagctgaatttgggtcacagacacagaaacaagttgatcttttctctgcgtctgaaccttctgtcacagtttcttcagctcctccgacggttgatctctttgcatcttctgaatcagttgtaagcccagaagccaagatatcaatacctgagtctatggctactcccaacattgttgacccatttgctgcagttcctatggataattttgatggatcagatccttttggtgccttcacttcccactcggcttcagtttctacaggtccacaagctccaagtgtacatgggagtgcaacaaacaccacaagcccgctgtctttcgcagactcgaagccacaacatttgcaaaagaaagatcctttccaggtgaaatcaggaatttgggcagattcgctgagccgtggactgattgatctcaatataactgctcccaaaaaagcttctctagctgatgtgggtgttgtgggggatctgagcaatgaagatgggaacaaagcatctgctgcatcgtactactcaggctggtccatgggtgcaggatccgggcttggtaaaactggcctatacagtacacagcagcagcagcaacaacaacaacaacaacaagcacctgatatctcagacgatttcttctccagcctcagtaaccaaaggtaccaatctggtggctttaagcagtga

SEQ ID NO: 140 - protein, 559 aa, Arabidopsis thaliana
MDFMKVFDQTVREIKREVNLKVLKVPEMEQKVLDATDNEPWGPHGTALAEIAQATKKFSECQMVMSVLWTRLSETGKDWRYVYKALAVIDYLISNGSERAVDEIIEHTYQISSLTSFEYVEPNGKDVGINVRKKAENIVALLNNKEKISEIRDKAVANRNKYVGLSSTGITYKSGSSASFGGSFQSGSSNFDSYKDRDSREDKNDYESFQKSRRGVKTEEQSYTSKKSFSRYGSTDHDNLSSGKKSPDSAKHRSYVSAAPSNNDDDFDDFDPRGTSSNKPSTGSANQVDLFGGDLIGDFLDSGPTETSSTNNNENFQEADLFADAAFVSASAQGAEFGSQTQKQVDLFSASEPSVTVSSAPPTVDLFASSESVVSPEAKISIPESMATPNIVDPFAAVPMDNFDGSDPFGAFTSHSASVSTGPQAPSVHGSATNTTSPLSFADSKPQHLQKKDPFQVKSGIWADSLSRGLIDLNITAPKKASLADVGVVGDLSNEDGNKASAASYYSGWSMGAGSGLGKTGLYSTQQQQQQQQQQQAPDISDDFFSSLSNQRYQSGGFK

SEQ ID NO: 141 - DNA, 2663 bp, Zea mays
tcctctctgctcacgagtaaagcctgccgctagcccgcgctctggacgtcgcctcctcccccaccccaccggctgtcgccgcccccgccgacgttacctccttacccgccgcacccccccccccccctgcccccccgtccttgccttggcggatctgcctgcctgtgccgcctggcgctgcctcttatcccgccggccgccgctgcctcacgttagctcctcccccatcgtatccggacctccgcgccgcccccacgcctccctgacttggtggatctgtccaccatccaccggaaacagttggtagccgcctaggtacccacctaccccctaggcgaggcggtaccccgtcgcccagcgcataagcgcgcccaggcgagcgcggaatagctccttttcgaatacactcgagcgaagcttagatctgatctcaaggaacctgcagcttgctgcagccactcctcgccggcgatggatttcatgaaggttttcgatcagactgtgcgtgagataaagagggaggtcaatctgaaggtactcaaggtccccgagatcgagcagaaggtacttgatgcaacaagtgatgaaccgtggggccctcatggaagtgctctttcagaacttgcacacgctaccaagaagttcgctgagtgccagatggtaatgaatgtcctatggactaggttgtctgagagaggcgcgaattggcgtcatgtgtataaggcattaactattatcgagtactttatagccaatggttctgagagggcagttgatgacattcttgatcattattctaagatctcggttctttcgagttttgagtatgttgagcctaatggtaaagacgttggaataaatgtgaggaaaaaagtagaaaccattgtgggcatcataaatgacaaggagaaaataaaggccgtgagagataaagcagccagtaatcgtgataagtacattggactatcatccacaggcataacatataaatcaagctcagcctcatttggtagcaactacagttcaggcgaacgttatgggagtttcagtggtacaaaggaagctgactcatacggtgatagttacagggacaaagaacctgttaaaacttccacaagcaatagcggcagtcggaaatctggcagcaagctgaggaaggatgcgaagcctgataggaggaatgaggattatagttcacccagctctttgagacccccatctaatacaaataacactgaggacgactttgatgactttgatcctcgtggatcagatggcaaaacaactgctaagtcaaatgaggtggatctgtttagcccaaacttgatggacgattttattgatgcatctgcagcaactccagcaacagacaatgctgcagaaccacaggttgatctgtttgctgatgcagattttcaatcggcaaccgcaagtacagatacagctgcaaatacagatgtcaaggtcaatgttgacctttttgcggaaaaggcatcttttcctgcagcatttccaccacaggctgggtttattccaccaccaagtgccgggacatcttctgaagtaaatacttccgtatccaagaaggcagctccggaaccttttgatccttttggcgctattcctttgaacagttttgatggacctgacccatttggtggcttcagctcaaatgctggatcatctaccgcagcagcacccacccacggttcaactggaaatatcagcacatcgaaccagaaccttcatgctgcaaccgactttgctgcctttgtatcaaacaatgagggagcagcgaaagacccattcgatctttcttcgagtgccaatgtcggaaaaacacctttggcagctcccaagatcgacgcatctgatttcggtgcatttgtatctagcaccgaggaagcagccaaggaccctctcgatctttcttcgggtagcaaccttggaaggacaggccaagcacccgcggcagcctccaaggctaacgcaaagaaagacaattttcaggtcaagtccggcatatgggcagactcgctgagccggggattgattgatctgaacataactgcaccgaagaaggtgaacctagctgatattggcatcgtcggtggccttggcgatgggtccgatgagaaggccctgccctcttggaccatgggcgccgtatccggcctaggaatgtctggtattccaccgtcaacacaacaagctggtggcatcgagagcttggccaactacaacaagcatcatttcggcttcaaataggcctcgatctttcatactggaaaatacccgtcatctgcggtttcctcctctgtcggcctgcttcttacatgtgctgccctattgatttaatcaccttttgttttgttttgttttttgttttggtgattacattacatggtatcgaccaatcttggccccgtcttgtcacgcgtgtatgttatttgtcgggtttgtgggtaagcatgcaactacatacacatcacaccccctgtgttccagctcgatgataggtggtatgttggccatgcagtttgtgtaaattccgtggcctgccttctctacttcacacagtactctacgcagcgatttgcagtgcttgagtttatattcaataataagagaacctatgccctttatgtctcgaaaaaaaaaaa

SEQ ID NO: 142 - protein, 598 aa, Zea mays
MDFMKVFDQTVREIKREVNLKVLKVPEIEQKVLDATSDEPWGPHGSALSELAHATKKFAECQMVMNVLWTRLSERGANWRHVYKALTIIEYFIANGSERAVDDILDHYSKISVLSSFEYVEPNGKDVGINVRKKVETIVGIINDKEKIKAVRDKAASNRDKYIGLSSTGITYKSSSASFGSNYSSGERYGSFSGTKEADSYGDSYRDKEPVKTSTSNSGSRKSGSKLRKDAKPDRRNEDYSSPSSLRPPSNTNNTEDDFDDFDPRGSDGKTTAKSNEVDLFSPNLMDDFIDASAATPATDNAAEPQVDLFADADFQSATASTDTAANTDVKVNVDLFAEKASFPAAFPPQAGFIPPPSAGTSSEVNTSVSKKAAPEPFDPFGAIPLNSFDGPDPFGGFSSNAGSSTAAAPTHGSTGNISTSNQNLHAATDFAAFVSNNEGAAKDPFDLSSSANVGKTPLAAPKIDASDFGAFVSSTEEAAKDPLDLSSGSNLGRTGQAPAAASKANAKKDNFQVKSGIWADSLSRGLIDLNITAPKKVNLADIGIVGGLGDGSDEKALPSWTMGAVSGLGMSGIPPSTQQAGGIESLANYNKHHFGFK

SEQ ID NO: 143 - DNA, 921 bp, Synechococcus sp.
atggaatcgcgtttgaaaccaggtttgattgtcctctgtgggccaacggcggcaggaaaatcgagtttggcgatcgcgatcgcccagcgtttgggcagcccaattttgagtgctgattcgcggctggtttatcgcgactttaatattggcaccgccaagcccacccctgccgagcagcagcaggtgccccactatttaatggatctctgtgatccccgccaagtttttaccgttggggattatcaagattgtgcagtgccactgattcagcaactccaggaaaaaggaatgctgcccttgttggtagggggtacaggtctctacatcaaagcgatcgtcaacggtttacgctttccccgcattgcaccgcagcctaagctgcgatcgcaacttcaagcgttaggtcagccactctgtcatgccctattacagcgggttgatccggtggctggcgaccgaattcatgtcagtgatcgcgttcggaccttgcgagccttagaagtcttctatgtcagtggcgatcgcctgacggatctgcagcaggagcaaccgccgagctatccaattctgcagattggcttggatagcgatcgcttagaagccaggattcagcagcgcacccagcagatgttaacgtcgggcttcgttgaggaagtgcaaggattgtgcgatcgctacggtagcgatctgccgctgctcaataccctgggctatcgccaggtttgtgcttttctacagggaagtttgagtcggtcagagttgccagagcaaatcgtcctgcagacgcgccagtatgccaaacagcagcgcacttggttccgggccgattcatcgattcagtggattgatgccgaagccagcaatcgcctggagcgggcgctagacctgattgagcgcttccgaaagagtgagggcgtttga

SEQ ID NO: 144 - protein, 306 aa, Synechococcus sp.
MESRLKPGLIVLCGPTAAGKSSLAIAIAQRLGSPILSADSRLVYRDFNIGTAKPTPAEQQQVPHYLMDLCDPRQVFTVGDYQDCAVPLIQQLQEKGMLPLLVGGTGLYIKAIVNGLRFPRIAPQPKLRSQLQALGQPLCHALLQRVDPVAGDRIHVSDRVRTLRALEVFYVSGDRLTDLQQEQPPSYPILQIGLDSDRLEARIQQRTQQMLTSGFVEEVQGLCDRYGSDLPLLNTLGYRQVCAFLQGSLSRSELPEQIVLQTRQYAKQQRTWFRADSSIQWIDAEASNRLERALDLIERFRKSEGV

SEQ ID NO: 145 - DNA, 909 bp, Acaryochloris marina
atgacgccagggttgatcgtaatttgtgggccaacggctaccggaaaatcctctctggcattggctttggcccgacgtttaggtgctcccattctcagtgcagactctcggcaagtctatcgggggtttgatattggtactgcgaaaccttctgtaacggatcaagaagatgttcctcactatctcattgatatatgtgaccctactgagactttgacggttgccgactaccaagagcaggctcaggcgctcattgctcagtttcatactgaggggcaaacgccgattctcgtgggggggactggactgtatatccgggcgattgtggaggggctgaagattccgcgggtaccgccgcaactggagttgcgatcgcaactccaatcccaaggccaggtccagatttaccaatggctccagcaagtcgatccaccagcagcccaaaaaattcatgcccatgaccaagtccgtaccctaagagcattagaagtcttttacaccacgggcatccccctatcagcacagcaaggcaagaatcccccgtcctatcccatcttgcaaattggcttagatattagtgatctggaccagcataccgacatcattcagcagcgcacggctgccatggtggagcagggttggttgactgaagtccaaaaactcatcgaccactatggggtcgaactccccctcttagcaaccctgggctatcaagaaatgaaggcctatctgcatcagcaaatcaccctagaagaagcaaccgcccaaactattcttcatactcgtcaattcgccaagcgccaacgcacctggtttagagcgaattctggcattcactggtttgatgccacgaattctgacttactttctctagtttggaaggatattcaaggtcaaccttggctgtaa

SEQ ID NO: 146 - protein, 302 aa, Acaryochloris marina
MTPGLIVICGPTATGKSSLALALARRLGAPILSADSRQVYRGFDIGTAKPSVTDQEDVPHYLIDICDPTETLTVADYQEQAQALIAQFHTEGQTPILVGGTGLYIRAIVEGLKIPRVPPQLELRSQLQSQGQVQIYQWLQQVDPPAAQKIHAHDQVRTLRALEVFYTTGIPLSAQQGKNPPSYPILQIGLDISDLDQHTDIIQQRTAAMVEQGWLTEVQKLIDHYGVELPLLATLGYQEMKAYLHQQITLEEATAQTILHTRQFAKRQRTWFRANSGIHWFDATNSDLLSLVWKDIQGQPWL

SEQ ID NO: 147 - DNA, 885 bp, Anabaena variabilis
atgactaaattaatcgtaatttgtggagctacggcgacgggtaaatctggtttggctttgaacttagccatgcggttgggttctgtgattttgagtgctgattctcgtcaagtgtatcgtgaatttgatattggtacagcgaagccaacgctggcagaacaaaaagccgttcctcattatctaatagatatctgcactcccagagaaacgatgacagttgcagattatcaagaacaggcacaagcactaattaattctctgccagtttcgccgttattgttagtgggaggtactggtttatatatacgttctattgtgcaggggatgaagatccccagggttgcgccgaattatgaattgcgatcgcaactcgaatctttaggtcaaactacactctacggcatattacaacaagttgatcccgttgcggctcaaaagattcatccccatgatcctgtacggactttacgggcagtagaagtattttacgttactggcattcccatatcggcacagcaaggagaaaatcccccagattaccctattttacaaattggattagattgtgaaatggaaagattgagtgagcgcattcacaaacgcactgaacaaatgatagcagatggcttagttggagaagttgaatatctgtgccaaaaatatggtgctgatttacccttgttaaatactttaggatatcaagaaattaagcaatatttagctggagaaatttccttagaagcagccaaagaattaatcgtactgcatacaagacaatttgccaaacgccaacgcacctggtttagagcctatccccaaattgagtggtttaatgcagatgatgctgatttattagatattgtttggcagcgcatacaacagtag

SEQ ID NO: 148 - protein, 294 aa, Anabaena variabilis
MTKLIVICGATATGKSGLALNLAMRLGSVILSADSRQVYREFDIGTAKPTLAEQKAVPHYLIDICTPRETMTVADYQEQAQALINSLPVSPLLLVGGTGLYIRSIVQGMKIPRVAPNYELRSQLESLGQTTLYGILQQVDPVAAQKIHPHDPVRTLRAVEVFYVTGIPISAQQGENPPDYPILQIGLDCEMERLSERIHKRTEQMIADGLVGEVEYLCQKYGADLPLLNTLGYQEIKQYLAGEISLEAAKELIVLHTRQFAKRQRTWFRAYPQIEWFNADDADLLDIVWQRIQQ

SEQ ID NO: 149 - DNA, 909 bp, Gloeobacter violaceus
gtgaaaaaaatcgtcgtcgtctgcggccccaccgccgccggcaaaagccaactgggaatgcatctggcccagcacctgggggtaccggtgctgagcgccgattcccggcaggtctaccgcgagttcgacatcggcactgctaaaccgacccgtgaagaacaacgccgcgtcgagcactgcctcatcgatgtcgcctggcccacggaacatttcaacgtggcgcgctaccgggaactggccgatgcggagattgaccggctgacccggcaaggcaaacccgccctactggtgggaggcagtggtttgtacctgcgcgcggtatcgggcggactcgaaccgcccgccgtcccccccgacccggctttgcgcgcccgcctggcggttgagcggttggacgcactttaccagcgacttcaacagctcgatcccgaatccgcggggcgcatccaccccaacgaccaggtgcgcatcgagcgcgccctcgaagtgtgcctgacaaccggccaaccgctgagtgcccagcgccgcctgcgggcgcgagatttttcgctcctcgccctgggggtgggcagcggccgggaagcgctggtgcgccgcatcgagcagcgcacccaccggatgatcgaagcgggttggctggaggaagtcgagtatctgcgcgccaaatacggccccgatttgccgcttctgagcaccctcggttacgccgagttgggggcgtacctggaggagcgatgggatctggcggaggcgctccagcagatcgtcgtgcatacccgccagttcgccaagcgccagatgacctggtttcgcgccgagcccgatgttcattggctcgatgaatcggcaggacggcagacacttgaacaacagagtatcgaacaggttgagcgctttcttgccggttga

SEQ ID NO: 150 - protein, 302 aa, Gloeobacter violaceus
MKKIVVVCGPTAAGKSQLGMHLAQHLGVPVLSADSRQVYREFDIGTAKPTREEQRRVEHCLIDVAWPTEHFNVARYRELADAEIDRLTRQGKPALLVGGSGLYLRAVSGGLEPPAVPPDPALRARLAVERLDALYQRLQQLDPESAGRIHPNDQVRIERALEVCLTTGQPLSAQRRLRARDFSLLALGVGSGREALVRRIEQRTHRMIEAGWLEEVEYLRAKYGPDLPLLSTLGYAELGAYLEERWDLAEALQQIVVHTRQFAKRQMTWFRAEPDVHWLDESAGRQTLEQQSIEQVERFLAG

SEQ ID NO: 151 - DNA, 936 bp, Microcystis aeruginosa
atgtcaactattctgattgttatttgtggggcaactgccacaggaaaatccagtttagccctacaattggccaaaaagtttaattcagtaattctcagtgccgattcccgacaaatctatcgagaatttaatattggtactgctaaacctagcttagaagaatgtcagcggattccccattatctaattgatatttgtgatcctcaagataattttaccctagcacagtaccaagaacaggctgagaatttaatcagcaatctccactattctcctctgtttttggtcggtggtacgggactttatatcaagtccattgtcaaaggtttaaaaataccgagggtttctcctcaagcggatttaagacggcaattacaagctttaggacaatcctatctttatcaaattctgatgcaggtagatgaagaggccgctaaaaaaattcatccccatgatcaggtcaggactttacgcgctttagaggttttttatgtgacaggaaaacctatctctagtcagcagggagaaaatccccccacttatccgattttacaaattggtttagactgttccccagaaagtttagacaagcggatcactgttcgtactcatcaaatgatcgccaagggattagtagcagaggtgcagaatttgggggataaatacggttgggatttgccacttttgcagactttgggttatgcagagattaagcaatatctcctcggagaagtttctttagaacaggcgatcgatctaattatcctccacacccgtcaatttgccaaacgtcagcgcacttggtttcgtgccgatgctgatattgtctggtttcccgtcgataaagaaaatttattggaattggtggaacgaaaaattattttgtttcttgaggggttgtcaaggcccgatataaaaacacatcatcctgattaa

SEQ ID NO: 152 - protein, 311 aa, Microcystis aeruginosa
MSTILIVICGATATGKSSLALQLAKKFNSVILSADSRQIYREFNIGTAKPSLEECQRIPHYLIDICDPQDNFTLAQYQEQAENLISNLHYSPLFLVGGTGLYIKSIVKGLKIPRVSPQADLRRQLQALGQSYLYQILMQVDEEAAKKIHPHDQVRTLRALEVFYVTGKPISSQQGENPPTYPILQIGLDCSPESLDKRITVRTHQMIAKGLVAEVQNLGDKYGWDLPLLQTLGYAEIKQYLLGEVSLEQAIDLIILHTRQFAKRQRTWFRADADIVWFPVDKENLLELVERKIILFLEGLSRPDIKTHHPD

SEQ ID NO: 153 - DNA, 888 bp, Nostoc sp.
atgactaaattaatcgtaatttgtggtgctacggcgacaggtaaatctggtttggctttgaacttagctatgcggctgggttctgtgattctgagtgctgattctcgtcaagtgtatcgtgaatttgatattggtacagcgaaaccaacgctagcagaacaaagagccgtccctcattatttaatagatatctgcgctcctagagagacgatgacagttgcagattatcaagaacaggcacaagcattgattaattctttgccagtctcgccgctattgttagtgggaggcacaggtttatatatacgttctattgtgcaagggatgaagatccccagggttgcgccgaattatgaattgcgatcgcaactcgcctctctaggtcaaactacactctacggcatattacaacaagttgatcccattgctgcccaaaaaattcatcccaatgaccctgtgcgaactttacgcgcagtagaagttttttacattactggcattcccatatcggcacagcaaggagagaatccgccagattacccaattttacagattgggttagattgtgaaatggaaagactgactgagcggattcacaaacgcactgagcaaatgataacagatggcttagttggagaagttgaatatctttgccaaaaatatggtgctgagttacccttgttaaatactttaggttatcaagaaataaagcaatatttaactggggaaatttccttagaagcagccaaagaattaactgttttgcatacacgacaatttgccaaacgccaacgcacctggtttagagcatctccccaaattgagtggtttaatgcagatcatcctgatttattagatattgtttgccagcacatacaacaaccgtag

SEQ ID NO: 154 - protein, 295 aa, Nostoc sp.
MTKLIVICGATATGKSGLALNLAMRLGSVILSADSRQVYREFDIGTAKPTLAEQRAVPHYLIDICAPRETMTVADYQEQAQALINSLPVSPLLLVGGTGLYIRSIVQGMKIPRVAPNYELRSQLASLGQTTLYGILQQVDPIAAQKIHPNDPVRTLRAVEVFYITGIPISAQQGENPPDYPILQIGLDCEMERLTERIHKRTEQMITDGLVGEVEYLCQKYGAELPLLNTLGYQEIKQYLTGEISLEAAKELTVLHTRQFAKRQRTWFRASPQIEWFNADHPDLLDIVCQHIQQP

SEQ ID NO: 155 - DNA, 900 bp, Prochlorococcus marinus
atgcaaaacccaaaaccattggtaatagttttgcttggaccaacagcaagcgggaaaactgatctagctatacaaatagccaaaaagataaaagtaagtattcacaatattgattcacgtcaattatataaaggaatgaatattggtactgctaaaccaacgatagagcagcaagaagaaataaagcattatctactagatcttaaagatcctaataaccccatcacattgcatgaattcaaaaaagaagcagagttgagcctaaagaatatttttagcaaagaaaagtgtggctttttggtcggcggaagtggcctctatttaaaatctctaacaagtggtttatgcccaccatctgttccagcacaagaaaaactccggaaagagtttagaagacttggacaaaaagagtgtcatcaaatactgaaaaaatgtgatcccattgcttgggaaaaaatttcccctagagattctattagaacaataagagcattagaagttttctattccactggacagacaataagctcattaaaaactttaaagcctcctgactggaatttattagagctagggttagatccaagaaatcttcaacaaagaattgctaaaagaacaaaaatattgttccaaaaaggtcttattgatgaaactaaagctttaattcatcaatatggagaagatcttcctttgctacagacaattggatacaaagaagcttgcacagtaataaaaggcgaatattcaattacagaagcaatcgaaatcacaacccaacgaacgaatcaatttgctaagaagcaaaggacttggtttagaagacaacataatccaaaatggctaaatgaaaaaaactctcttgaagaagctctctctttgatccaaaacgttatagggtga

SEQ ID NO: 156 - protein, 299 aa, Prochlorococcus marinus
MQNPKPLVIVLLGPTASGKTDLAIQIAKKIKVSIHNIDSRQLYKGMNIGTAKPTIEQQEEIKHYLLDLKDPNNPITLHEFKKEAELSLKNIFSKEKCGFLVGGSGLYLKSLTSGLCPPSVPAQEKLRKEFRRLGQKECHQILKKCDPIAWEKISPRDSIRTIRALEVFYSTGQTISSLKTLKPPDWNLLELGLDPRNLQQRIAKRTKILFQKGLIDETKALIHQYGEDLPLLQTIGYKEACTVIKGEYSITEAIEITTQRTNQFAKKQRTWFRRQHNPKWLNEKNSLEEALSLIQNVIG

SEQ ID NO: 157 - DNA, 900 bp, Prochlorococcus marinus
atgtcgtcatcaaaaccactcataattgttctccttggacctactgctagcgggaaaactgcactagggatagaaatagctgagcatctgggactcgagatacataatgttgattctcgtcaggtttatatggatatggacatcgggaccgcaaaaccatcccaagaacagcaaaaacgtataagacatttcttgattgatttaaagccgcctaatgaaaaaatgacaatgcatgatttccataaaacagcaagagtcagcttggataatgcattaaataaaacaaacgttggattacttgttggtggaagtggtctgtatctcaaagccttaactagcggtctatgccctccatccattcctcccgaatcaagttttaggaaacaattacatgacattggtcaagagcagtgttatcaacttctccaaagctgcgacccactgagcgcgaaaaccattgctccatcagactcagtcagaacaacaagagcactagaagttttttatgcaactggtcaatctaaaacttcccttcaatcttccaaaccacctccctggaggttattagagctaggacttaatccaagtaatctcaatgatcgcattgcacaaagaacagaaaacatttttcaaaacggtcttattgaagaaactgaacacctcattggaaaatttggaaaggaattgcccttgctaaacactattggatatgcagaggcatctcaaatgattgatggcaagcttcccttaaatgacgccatatttcaaacaaataaaagaactaagcaatttgcaaaaagacaaaaaacttggtttaggggtcaacacaatccaaaatggttaaatgagaaaaacccacttagtgaagctctctctttgatccataacgttataaggtga

SEQ ID NO: 158 - protein, 299 aa, Prochlorococcus marinus
MSSSKPLIIVLLGPTASGKTALGIEIAEHLGLEIHNVDSRQVYMDMDIGTAKPSQEQQKRIRHFLIDLKPPNEKMTMHDFHKTARVSLDNALNKTNVGLLVGGSGLYLKALTSGLCPPSIPPESSFRKQLHDIGQEQCYQLLQSCDPLSAKTIAPSDSVRTTRALEVFYATGQSKTSLQSSKPPPWRLLELGLNPSNLNDRIAQRTENIFQNGLIEETEHLIGKFGKELPLLNTIGYAEASQMIDGKLPLNDAIFQTNKRTKQFAKRQKTWFRGQHNPKWLNEKNPLSEALSLIHNVIR

SEQ ID NO: 159 - DNA, 900 bp, Prochlorococcus marinus
atgtcttcatatccaactcctgtaataattttaattgggccaactgcaagtggcaaaacagaattagctattaaaattgcagaatattttaaaactagtattcacaatatcgattcgagacaaatatataaatttatggatattggaaccgccaagccatctaaagaccaacaaaaaaaaataaagcattttttaatagatatagaggagccaatcaatcaaattaatgtgcaacaatttcaaaaaattgctcaaaaatcaataaaaagagaaataaatcaagacaatctaccttttcttgttggggggagtggtttgtatatgaactcaataacaaaaggtttttttataccagatattcctcctcaaaataatttgagaatacaattagaagaacttggccaaaaaaaatgttgggaactcttaaataattgtgatccattatcaacaaaaaacatcagttttgctgatcgcattagaacaataagagctttagaagttttctatgtaacgggtaaacctttgtcaactctaaaagttcaaaatccgcctaattggaaagtactagagcttggattagatagagataacttaaaagaaagaattttacaaagaacaaaaaatatttttctttcgggaattattgaagaaacaaaccaccttatctctaaatacggatttgatttgccaatattagaaaccattggttatcgagaagctaaggatgttttaaagaaccattcaacaatcgacaaggcgattgaattaactacgacaaaaacgatccaatttgccaaaagacaaaaaacttggtttcgcaataaaaataatcctatttggctgaataacaaaaacctactaaaagatgcaataattaagatagagtcttttttaagctaa

SEQ ID NO: 160 - protein, 299 aa, Prochlorococcus marinus
MSSYPTPVIILIGPTASGKTELAIKIAEYFKTSIHNIDSRQIYKFMDIGTAKPSKDQQKKIKHFLIDIEEPINQINVQQFQKIAQKSIKREINQDNLPFLVGGSGLYMNSITKGFFIPDIPPQNNLRIQLEELGQKKCWELLNNCDPLSTKNISFADRIRTIRALEVFYVTGKPLSTLKVQNPPNWKVLELGLDRDNLKERILQRTKNIFLSGIIEETNHLISKYGFDLPILETIGYREAKDVLKNHSTIDKAIELTTTKTIQFAKRQKTWFRNKNNPIWLNNKNLLKDAIIKIESFLS

SEQ ID NO: 161 - DNA, 900 bp, Prochlorococcus marinus
atgtcttcacatccacctcatgtaatagttttaattgggcctactgcaagtggcaaaacagaattagctattgaaattgcagaatattttaaaactaatatacacaatatcgattcaaggcaaatatataagtccatggatattggaacagccaagccatctaaaatccaacaaaaaaaaatacggcattttttaatagatattgaagaacctatcaatccaattaatgtaaaacaatttcaagaaattgctcagaaatcgatcaaagaagaaattaaaaaagataaattaccttttcttgttggaggaagtggtttgtatatgaactcaataacaaaaggttttttcgtaccagatgtccctcctcaaaataatttaagaaaacaattagaagaacttggtcaggaaaaatgttgggacctgttagaaaattgtgatccattatcaacaaaaaaaatcaattttgctgaccacgttcgaacaataagagctttagaagtcttctacgtaacaggtaagcctttatcaactctgaaagttcagaaaccacctaactggaaaatcttagagcttggattagacagaggtaatttaaaagaaagaatttttcaaagaacaaaaaatatgtttttatctggaataattgatgagacgaatcaccttatctctaaatacggatttgatttgccaatattagaaacaattggctatcgagaagctagaaatgttttaaataaccattcaacaattgacaaagcgattgagttaactgcaacaaaaacaatccaatttgccaaaagacaaaaaacttggtttcgtaataaaaataatcctctttggcttaataacaaaaacccgctaaaagatgcaataattaagatagagtcttttttaagctaa

SEQ ID NO: 162 - protein, 299 aa, Prochlorococcus marinus
MSSHPPHVIVLIGPTASGKTELAIEIAEYFKTNIHNIDSRQIYKSMDIGTAKPSKIQQKKIRHFLIDIEEPINPINVKQFQEIAQKSIKEEIKKDKLPFLVGGSGLYMNSITKGFFVPDVPPQNNLRKQLEELGQEKCWDLLENCDPLSTKKINFADHVRTIRALEVFYVTGKPLSTLKVQKPPNWKILELGLDRGNLKERIFQRTKNMFLSGIIDETNHLISKYGFDLPILETIGYREARNVLNNHSTIDKAIELTATKTIQFAKRQKTWFRNKNNPLWLNNKNPLKDAIIKIESFLS

SEQ ID NO: 163 - DNA, 900 bp, Prochlorococcus marinus
atgcccgcctctaagccgcttctgattgcgctgctagggccgacagcaagcggcaaaacatgcctggccttacagctggcagaacagctgaagctgagcgtgctcaatgtggattcccgccagctctacatcggcatggacgttggcaccgccaagccaaccaaagaacaacagcggcgcgtgcaacatcacctgattgatcttcgtcgcccagatcaaccgatcaccctgcaggaattccaggcagccgcgcaactgatccttgcgcaaaagctaagggaacaaaacatgccatttctagttggcggcagtggtctttatctcaaagctctcacttgtgggctgcgcccaccagcagtgccaccccaaccagagctccgcaagcagttaggcgagctaggacaacgcacctgccaccacctactccaagccgccgatcccaccgctgccagccgaattgcccctgctgatgccatgcgcaccaaacgggctctggaagtggtttatgccactggcaaaccgatcaccactcaacaaggctcaagcccacccccttggcgcgttctggaactaggcctcgacccacacaacctgcgcgaacgcattggccaacgcacaacgcagctctatgccaatggtctcatcgaagaaaccgaacacttgagtcagtgctacgacagcgatctgcccttgctgcaaacaatcggctatggggaagcactaaaggtgattcaaggcctactcaaccgtgaacaggccatcgccctgaccacacgtcgtactcagcagttcgccaagcgtcagcgcacatggttccgcagacaacatcacccctattggctcaaaggtgaggaaccgctgagcgaagcgctatcactgattcaagcgggtctaaggtga

SEQ ID NO: 164 - protein, 299 aa, Prochlorococcus marinus
MPASKPLLIALLGPTASGKTCLALQLAEQLKLSVLNVDSRQLYIGMDVGTAKPTKEQQRRVQHHLIDLRRPDQPITLQEFQAAAQLILAQKLREQNMPFLVGGSGLYLKALTCGLRPPAVPPQPELRKQLGELGQRTCHHLLQAADPTAASRIAPADAMRTKRALEVVYATGKPITTQQGSSPPPWRVLELGLDPHNLRERIGQRTTQLYANGLIEETEHLSQCYDSDLPLLQTIGYGEALKVIQGLLNREQAIALTTRRTQQFAKRQRTWFRRQHHPYWLKGEEPLSEALSLIQAGLR

SEQ ID NO: 165 - DNA, 900 bp, Prochlorococcus marinus
atgtcttcttatccccctcatgtaatagttctaattggagccacagcaagtgggaaaacagaattagctatcgaaattgcagaatattttaaaactcgtatacataatatcgattcgagacaaatttataaatctatggatattggaacagccaaaccatctgagaatcaacaaaaaaaaataaagcattttctaatagatatagaagaacctattaatccaattaatgtaaaacaatttcaagaaattgctcaaaaatcaatacaaaaagaaattaagcaaaataatttacctctacttgttggaggaagtggtttgtatatgaacgcaataaccaaaggtttttttgtgccggatgtccctccgcaaaataatttgagagagcaattggaggaacttggtcaaaaagaatgttgggagcttttaaaaaattgtgatccaatttcggcaaaaaaaatcaatcttgctgatcaaattagaacaataagagctttggaagtattttatgtaaccggtaaacctttatcttctcaaaaagttcaaaaaccgcctcaatggaaaatactagagcttggattaaatagagataatttaaaagaaagaatttcacgaagaacaaaaaatatgtttttatctggaattattgaagagacgaaaaatcttatttctcgatatggatctgatttaccaatattagaaactattggttaccgtgaagctaaagatgttttaaataataatttaccgattgataaggcgattgagttaactaatataaaaacgaaccaatttgccaaaaggcagaaaacatggtttcgtaataaaaataatcctatttggcttaataacaaaaacctgctaaaagatgcaataattaagatagagtcttttttagactaa

SEQ ID NO: 166 - protein, 299 aa, Prochlorococcus marinus
MSSYPPHVIVLIGATASGKTELAIEIAEYFKTRIHNIDSRQIYKSMDIGTAKPSENQQKKIKHFLIDIEEPINPINVKQFQEIAQKSIQKEIKQNNLPLLVGGSGLYMNAITKGFFVPDVPPQNNLREQLEELGQKECWELLKNCDPISAKKINLADQIRTIRALEVFYVTGKPLSSQKVQKPPQWKILELGLNRDNLKERISRRTKNMFLSGIIEETKNLISRYGSDLPILETIGYREAKDVLNNNLPIDKAIELTNIKTNQFAKRQKTWFRNKNNPIWLNNKNLLKDAIIKIESFLD

SEQ ID NO: 167 - DNA, 900 bp, Prochlorococcus marinus
atgcccgcctctaagccgcttctgattgcgctgctagggcccacagcaagcggcaaaacatgcctggccttacagctggcagaacagctgaagctgagcgtgctcaatgtggattcccgccagctctacatcggcatggacgttggcaccgccaagccaaccaaagaacagcagcggcgtgtgcagcatcacctgattgatcttcgtcgcccagatcaaccaatcaccctgcaggaatttcaggcagccgcgcaactgatccttgcgcaaaagctaagggaacaaaacatgccatttctagttggcggcagtggtctttatctcaaagctctcacttgtgggctgcgcccacccgcagtgccaccccagccagaactccgcaagcagttaggcgagctaggccaacgcacctgccaccacctacttcaagccgccgatcccaccgctgccaaccgaatttcccctgctgatgccatgcgcactcaaaggggtctggaagtggtttatgccactggcaaaccgatcaccactcaacaaggctcaagcccacccccttggcgcgtgctggaactaggcctcgacccacacaacctccgcgaacgcattggccatcgcacaacacagctctatgccaatggtctcatcgaagaaaccgaacacttgagtcattgctacgacaccgatctgcccttgctgcaaacgattggctatggggaagcactaaaggtgattcaaggcctcctcaaccgtgaacaggccatcgccctgaccacacgtcgtactcaacagttcgccaagcgtcagcgcacatggttccgcagacaacatcacccctattggctcaaaggtgaggaaccgctgagcgaagcgctatcactgattcaagcgggtctaaggtga

SEQ ID NO: 168 - protein, 299 aa, Prochlorococcus marinus
MPASKPLLIALLGPTASGKTCLALQLAEQLKLSVLNVDSRQLYIGMDVGTAKPTKEQQRRVQHHLIDLRRPDQPITLQEFQAAAQLILAQKLREQNMPFLVGGSGLYLKALTCGLRPPAVPPQPELRKQLGELGQRTCHHLLQAADPTAANRISPADAMRTQRGLEVVYATGKPITTQQGSSPPPWRVLELGLDPHNLRERIGHRTTQLYANGLIEETEHLSHCYDTDLPLLQTIGYGEALKVIQGLLNREQAIALTTRRTQQFAKRQRTWFRRQHHPYWLKGEEPLSEALSLIQAGLR

SEQ ID NO: 169 - DNA, 900 bp, Prochlorococcus marinus
atgcttccttcaaaaccactagtaatagttttaatcgggccgacagcaagtggcaaaactgagctagcaatagatatcgctaaatattttaatatccatatacacaatgtagattctagacaaatttatagatttatggacatcggcacagctaaaccaacgaaagttcaacaaagagctataaagcattttttaatagatgttgaagatccctcagtaaaagtaaatgcaaagcaatttcaagaaattgccacaaaatcaataaatcgagaattaaatcagaaaaaaacaccctttctagttggtggtagcggattatatatgaattcaataataaagggattttttgcaccagatgttcctcctcaaagttttctgaggtcccaattcgaaaaattaggtcaagaaaaatgttgggaacttctaaaagtttgtgaccctgaattaacaaaaacaattaattatgccgatcaaataagaaccataagaggtttagaagtcttttatgtaactggtaaaagaatgtcatctcaaagattccaaaaccctcctccatggagaatcttagaattgggtataaatagagtagatttaaaggaaagaattttcaaaagaacaaaaaacatgtttgaatttggaattatagaggagaccaaaaatatcattaatcaatatggatcgactttgcctttactagaaacgattggatataaagaggcaaaaaatgtaatcaaagaaaatttaacaattgaagaagctattgaattaacaacaactaaaacaatccaatttgctaaaagacaaaaaacatggttccgtaataagaacaatgcaatatggcttaacaacaaaaacctactaaaagatgcaataattaagatagagtatgctttaggttaa

SEQ ID NO: 170 - protein, 299 aa, Prochlorococcus marinus
MLPSKPLVIVLIGPTASGKTELAIDIAKYFNIHIHNVDSRQIYRFMDIGTAKPTKVQQRAIKHFLIDVEDPSVKVNAKQFQEIATKSINRELNQKKTPFLVGGSGLYMNSIIKGFFAPDVPPQSFLRSQFEKLGQEKCWELLKVCDPELTKTINYADQIRTIRGLEVFYVTGKRMSSQRFQNPPPWRILELGINRVDLKERIFKRTKNMFEFGIIEETKNIINQYGSTLPLLETIGYKEAKNVIKENLTIEEAIELTTTKTIQFAKRQKTWFRNKNNAIWLNNKNLLKDAIIKIEYALG

SEQ ID NO: 171 - DNA, 900 bp, Prochlorococcus marinus
atgtctagagaccttcctaatgtcataattttgattgggcctactgcaagtggcaaaacagaattagctattgaaattgcagaatattttaaaactcatatacataatatcgattcaaggcaaatttataagtccatggatattggaacagccaagccatctaaaaaccaacaaaaaaaaatcaagcattttttaatagatattgaggagccaatccatccaattaatgttaaacaatttcaaggaattgctcaaaaatcaataaaaagtgaaattaaacaaaataatctaccttttcttgttggaggtagtgggttgtatatgaactcgataacaaaaggtttttttgtaccagacgtcccacctcaaaatgatttgagaaaacaattggaagaacttggtcagaaaaaatgttgggacttattaaaaaattgtgatccattatcaacaaaaaaaattaattttgctgaccatattagaacaataagagctttagaagtcttttacgtcacaggaaaacctttgtcaactttgaaagtgcaaagggcgcctgactggagaatactagagcttggattagatagagataatttaaaagaaagaatattacaaaggacaaaaaatatgttttcagcgggaattattgaagagacaaactacctcatctctaaatacggatttgatttgccaatattagaaaccattggatatcgagaagctaaggatgttttaaaaaaccattcaaccattgacaaagcaattgagttaactacgacaaaaactatccaatatgcaaaaagacaaaaaacttggtttcgtaataaaaataatcctctttggcttgataacaaaaaccttctaaaagatgcaataattaagatagagtcttttttaagctaa

SEQ ID NO: 172 - protein, 299 aa, Prochlorococcus marinus
MSRDLPNVIILIGPTASGKTELAIEIAEYFKTHIHNIDSRQIYKSMDIGTAKPSKNQQKKIKHFLIDIEEPIHPINVKQFQGIAQKSIKSEIKQNNLPFLVGGSGLYMNSITKGFFVPDVPPQNDLRKQLEELGQKKCWDLLKNCDPLSTKKINFADHIRTIRALEVFYVTGKPLSTLKVQRAPDWRILELGLDRDNLKERILQRTKNMFSAGIIEETNYLISKYGFDLPILETIGYREAKDVLKNHSTIDKAIELTTTKTIQYAKRQKTWFRNKNNPLWLDNKNLLKDAIIKIESFLS

SEQ ID NO: 173 - DNA, 900 bp, Prochlorococcus marinus
atgttccaaccaaaaccattagtaatagttttaatcggacctacagcgagtggcaaaactgagctaggaatcgaaattgctaaatattttaatctcaatatacataatgtcgactcaagacaactttatcgatttatggacataggtacagcaaagccaactaaagaacaacaaaaaacaataaagcattttttaatagatcttgaagaaccctctagccaagtaaatgcaaaacaatttcaagaaattgctaccaaatcaataaatcgagaactaaatcaaaacagaattccttttctaataggcgggagcgggctatatatgaattcaataataaagggtttctttgctccgaatgtgccccctcaaaaagttttaagatcacaattcgaaaaactagggcaagaaaaatgttgggaacttttaaaaatttgtgatcctgtcttaacaaaaaaaatcaattacgctgatcaagttagaacgataagagctttagaagtcttttatgtaacgggcaaaccaatatcctctcaaaaattccagaaccctcccccatggaaaatattagaattaggtctatacagagaagatttaaaagaacgtattttcaaaagaacaaaaaatatgtttgaatttggaattatagatgagaccaaaaagattattaatcaatatggatcaaatttacctttactagaaacgattggatatagagaagccaaggatgtaataaaggaaaatttaaaacttgaaaaagctattgaaataactacaacaaaaacaatccaatttgctaagagacaaaaaacatggttccgtaataaaaacaatccaatatggcttaataacaaaaacctactaaaagatgcaataatcaatataaagcatgcattacgctag

SEQ ID NO: 174 - protein, 299 aa, Prochlorococcus marinus
MFQPKPLVIVLIGPTASGKTELGIEIAKYFNLNIHNVDSRQLYRFMDIGTAKPTKEQQKTIKHFLIDLEEPSSQVNAKQFQEIATKSINRELNQNRIPFLIGGSGLYMNSIIKGFFAPNVPPQKVLRSQFEKLGQEKCWELLKICDPVLTKKINYADQVRTIRALEVFYVTGKPISSQKFQNPPPWKILELGLYREDLKERIFKRTKNMFEFGIIDETKKIINQYGSNLPLLETIGYREAKDVIKENLKLEKAIEITTTKTIQFAKRQKTWFRNKNNPIWLNNKNLLKDAIINIKHALR

SEQ ID NO: 175 - DNA, 900 bp, Prochlorococcus marinus
atgcaacccaataagcctcttgtcatagcccttatgggcccaactgcaagtggtaaaactgaacttgcaattgatattgcaaaaaaaatcaattctaatattcacaatatcgattctcgccaaatctatattgatatggatattggcaccgcaaagccaacagcagttcaacaaagccaagtaaaccatttccttattgatgtttgcttgccatctaaaccaatcaatcttcatgattttcaatccatagcccaaacatccattgagagagatttagaaaaaaagggtttaacgttacttgtaggaggaagtggcttatatcttcaagccttaattggaggacttaatcctccagctgtacctcctcagaaattcttaagagatcaacttaaaaaaatcgataaaaccgaactacacaaattattaaagctttgtgaccctttttcagcgcagagaatacatccagaagactcaataagaatcattcgtgctcttgaagttttttatgccacgggaaaaatgttttcgaaggaaaaaaacatgacgcctattccttggagagtgttagaacttggagtaaatcctgaaaatttaatcagtagaattcaacgtagaactgaagaaatgtataaaaaaggtttaatagaagaaacagaagatttgatcaataaatacggaaaaaatttacagttgcttaaaactattggatatggtgaagcaaggtctatgattaatggaaagattaattatgaggaggctttagaaataacaatcaaacgaacttgccaattagccaaaagacaaaaaacttggtttagaaataagcatcattctaaatggctaaataatgagaatgcattacccgaagctttaacttctatctatgagtttctaggttga

SEQ ID NO: 176 - protein, 299 aa, Prochlorococcus marinus
MQPNKPLVIALMGPTASGKTELAIDIAKKINSNIHNIDSRQIYIDMDIGTAKPTAVQQSQVNHFLIDVCLPSKPINLHDFQSIAQTSIERDLEKKGLTLLVGGSGLYLQALIGGLNPPAVPPQKFLRDQLKKIDKTELHKLLKLCDPFSAQRIHPEDSIRIIRALEVFYATGKMFSKEKNMTPIPWRVLELGVNPENLISRIQRRTEEMYKKGLIEETEDLINKYGKNLQLLKTIGYGEARSMINGKINYEEALEITIKRTCQLAKRQKTWFRNKHHSKWLNNENALPEALTSIYEFLG

SEQ ID NO: 177 - DNA, 900 bp, Prochlorococcus marinus
atgcaacccaataaacctcttgtcgtagcccttatgggcccaactgcaagtggtaaaactgaacttgcgattgatattgcaaaaaaaatcaattctaatattcacaatattgattctcgccaaatttatattgatatggatattggcaccgcaaagccaacagcagttcaacaaagccaagtaaaccatttccttattgatatttgcttgccatctaaaccaatcaatcttcatgattttcaatccatagccaaaacatccattgagagagatttagaaaaaaagggtttaactttacttgtaggaggaagtggtttatatctgcaagccttaattggaggacttaatcctccagcggtacctcctcaaaaattcttaagagatcaacttaaaaaaatcgataaagccgaacgacacaaattattaaagctttgtgaccctttctcagcgcagagaatacatccagaagactcaataagaataattcgtgctcttgaagttttttatgcaacaggaagaatgttttcgaaggctaaaaacatgaggcctactccttggagagttttggaacttggattaaatcctgaaaatttaaccagtagaattcaacttagaactagagaaatgtataaaaaagggttagtagaagaaacaggagatttgatcaataaatacggaaataatttacagttgcttaaaactattggatatggtgaagcaaggtctatgattaatggaaagattaattatgaggaggctttagaaataacaataaaacgaacttgccaattagccaaaagacaaaaaacttggtttagaaataagcataattctaaatggctaaatgatgagaatgcattacccgaagctttagcttctatctatgagtttcttggttga

SEQ ID NO: 178 - protein, 299 aa, Prochlorococcus marinus
MQPNKPLVVALMGPTASGKTELAIDIAKKINSNIHNIDSRQIYIDMDIGTAKPTAVQQSQVNHFLIDICLPSKPINLHDFQSIAKTSIERDLEKKGLTLLVGGSGLYLQALIGGLNPPAVPPQKFLRDQLKKIDKAERHKLLKLCDPFSAQRIHPEDSIRIIRALEVFYATGRMFSKAKNMRPTPWRVLELGLNPENLTSRIQLRTREMYKKGLVEETGDLINKYGNNLQLLKTIGYGEARSMINGKINYEEALEITIKRTCQLAKRQKTWFRNKHNSKWLNDENALPEALASIYEFLG

SEQ ID NO: 179 - DNA, 1023 bp, Synechococcus sp.
atggatcaaaaccggtctccaaatgggcgcgactgtcgagaacctccctccccctcctcgactgcaaggccggggcttgtcgtcatcgctggccccacggccaccggcaagtcgcgccaggcgctgctgttggcccagcggctgggatcccccctgttgaacgccgactctcgtcaggtgtaccgggagttcgacatcggcactgccaagcccactcccgccgagcgggccctctggccccacgagttgattgactttgtggatccccgccacacctatacagtggccgagtttcagcaggcggcccaggcgcgcattgccgcagcccatcggcagggacagactcctattctggtggggggcacagggctctacattcagtcgatcacggcaggcttagggatcccggcagttcccccccagcctcagttgcgcgctcaactggagacgtggccgcccgagatccgctacgcctggctgcagcagttggatcctgtggcagcggggcagattcaccctcatgatgaagtgcgcaccctgcgggctttggagatcatctacaccactgggaagccggcttcctacctgcggcaggcccatcctcctgactaccccattttgctcttggggttgcactgcccaatgccccgtctggaacaacgcattgcccggcgcacagcagaaatgctggcggcaggctggattgaggaggtaaaaacgctgcggcagcgctacggcccagacctgcccctcttgcagaccttgggctatgcggagatcggcgcttacctggaagggcggatcccggcagccgagctgcagcctctgattgtgcggcgcacccgccagtttgccaagcggcagatgacctggtttcgggccatgccagggatccagtggctggactgcgaggccgaggatctgcccgaacagatctggaagcgggttacagcgtggatggcagctcagaccagcgccggaaccactcctgccgtcgccgcgcgtccgcccgccgatccgtaa

SEQ ID NO: 180 - protein, 340 aa, Synechococcus sp.
MDQNRSPNGRDCREPPSPSSTARPGLVVIAGPTATGKSRQALLLAQRLGSPLLNADSRQVYREFDIGTAKPTPAERALWPHELIDFVDPRHTYTVAEFQQAAQARIAAAHRQGQTPILVGGTGLYIQSITAGLGIPAVPPQPQLRAQLETWPPEIRYAWLQQLDPVAAGQIHPHDEVRTLRALEIIYTTGKPASYLRQAHPPDYPILLLGLHCPMPRLEQRIARRTAEMLAAGWIEEVKTLRQRYGPDLPLLQTLGYAEIGAYLEGRIPAAELQPLIVRRTRQFAKRQMTWFRAMPGIQWLDCEAEDLPEQIWKRVTAWMAAQTSAGTTPAVAARPPADP

SEQ ID NO: 181 - DNA, 891 bp, Synechocystis sp.
atgaccccattaatggtgctggttttgggcccaaccgccagcggcaagaccagccttggcattgccctggcccaacagctcgattgccgggttctctcgattgattcgcgccagctctatgcaggcatggacatcggcacggccaaacccacgcgcgacgagcagcagcaggcccgccacgagctgttgaacctgagcacgcccgatcagcccatcaacctgcagcagttctgctcccatgcccagacgctgattgagcaagagcaacagcgggggcggcccgcgttgctggtgggcggcagcgggctgtatttgcaagccttgagccaagggctgcagccccccgccctaccgccacaaacggggctgcgtcagcaactgcagcaactggggcagtcctgttgtcatcagctgctgagccaggcggaccctcaagccgcagccaagatcgagcccaacgatccagtccgcacacagcgggcactggaggtgctctacggaaccggtcaaaccatctcaagccaacaggggcgctgcccgccggcctgccgggtgctggaactggggctcaaccccagcgacctcaaagagcgcattgagcagcgcacagcctccctctacgccaggggcctcgtggccgaaaccgaaacgctcagcaggcgctacggagctgatctgccccttctgcagaccattggttacggcgaagccctggcggtactcgccggcaggctcagcgagtccgaagcgcaagcactcaccagccggcgcacctggctgtttgccaaacgccaacgcacctggttccgcaaccgccatcagcccctttggctaaacacggaatccgcacttgaagaagcattggaagccattgcagcggccaggtcttag

SEQ ID NO: 182 - protein, 296 aa, Synechocystis sp.
MTPLMVLVLGPTASGKTSLGIALAQQLDCRVLSIDSRQLYAGMDIGTAKPTRDEQQQARHELLNLSTPDQPINLQQFCSHAQTLIEQEQQRGRPALLVGGSGLYLQALSQGLQPPALPPQTGLRQQLQQLGQSCCHQLLSQADPQAAAKIEPNDPVRTQRALEVLYGTGQTISSQQGRCPPACRVLELGLNPSDLKERIEQRTASLYARGLVAETETLSRRYGADLPLLQTIGYGEALAVLAGRLSESEAQALTSRRTWLFAKRQRTWFRNRHQPLWLNTESALEEALEAIAAARS

SEQ ID NO: 183 - DNA, 912 bp, Synechocystis sp.
atggccaaagttccgcccctgattgttatttgtggcaccaccgccagtgggaaatcccaactagcccttgatctagcccagcggttaaacgcagttattttgggggccgattccaggcaaatttataaagaattggacattggcaccgctaaacccacccttggcgatcgccaaacggtaccccattatctgattgacatttgtgaaccaacggaaaacttcaccctagcggaataccaacggcaagcccaggagttgattgcgtcattaaaccaaccgattctgctggtaggcggcactggtttatacatccaggcgatcgtcaaggggttaaaaattcctgctgttccaccccagaccaatttacgtgaacagttagctaacctcggccaacccttttgttatcaacttttaagtcaagtggaccccgtagcccaaagcaaaattgaacccgctgacgtggtgcggaccctgcgggctttggaagttttctatgccactgggcgacccatttccagcctacaaggggaaaatccccccagttatcccattgtgcaaatcggtttaggtctggaaccggagcaactccaacccagaattgttcaccgtacccatgccatggttgaggcggggttagtgaaggaagttgagggtttaatcaatcagtatggggaagacctacccctgctccatacccttggttacgctgagattaaacaatatctccaaggtcaaatatcgttaactcaagcgacggagtccatcattgtccacaccaggcaatttgccaaacgtcagcgcacttggttccgcaaagattcggcaatccactggtttgatgctaaccagccaaacctattagattcggtgacaaagttagtacaagttgacgtaaacgaaggaatgttttaa

SEQ ID NO: 184 - protein, 303 aa, Synechocystis sp.
MAKVPPLIVICGTTASGKSQLALDLAQRLNAVILGADSRQIYKELDIGTAKPTLGDRQTVPHYLIDICEPTENFTLAEYQRQAQELIASLNQPILLVGGTGLYIQAIVKGLKIPAVPPQTNLREQLANLGQPFCYQLLSQVDPVAQSKIEPADVVRTLRALEVFYATGRPISSLQGENPPSYPIVQIGLGLEPEQLQPRIVHRTHAMVEAGLVKEVEGLINQYGEDLPLLHTLGYAEIKQYLQGQISLTQATESIIVHTRQFAKRQRTWFRKDSAIHWFDANQPNLLDSVTKLVQVDVNEGMF

SEQ ID NO: 185 - DNA, 933 bp, Synechococcus sp.
atgcctcacaccagccccgaaacggaggcccaacgcgacagcaacgcccccctcgtggtggtgctgctcggacccaccgccagcggcaaaaccgccctcgcgctggagctggccgagcgcttcgacctggagatcatcaatgtggattcccggcagctgtaccaggagatgagcgtaggcacggccaagcccagcccggagcaacaggcccgcatccgccaccatctgctcgacctgcgcccccccgaccaaccgatcaccttgcaggaattccaggaggaagccctccaggcggtgaatcagagcctggccaaacgcggcgccgcctttctcgtgggcggcagcgggctctatctcaaggccctcacagctggtctgcgcccccccgctgtggcgccccaaccggcgctgcgccggcaactggcgcagctgggccaaccgctgtgccaccagctgctcaacactgccgatcccgaggcagccgtgcgcatcgccagcgcagatgcgctgcgcacccaacgcgccctggaggtgttgtacgccacaggcgcaccgatgagccgccaaaccagtgccagtccgccgccctggcgcgtgctggagctgggcctcaatccgctcgacctgcgccagcgcatcagtgcacgcacccaggcgctgtacagccaagggctggtggaggaaacccgccagctgcgcgagcgctacggccccgagctgccgctcctgcaaaccattggctacggcgaagcgttgcaagtgctcgcaggcgatctcagccgtcccgctgcgatcgcccacaccacccggcgcacccagcaattcgccaaacggcagcgcacctggttccggcggcagcaccagccgcactggctgcccgatgacaatcccctgaatgaagccggacgcctgatcgaagcgggtctaggctga

SEQ ID NO: 186 - protein, 310 aa, Synechococcus sp.
MPHTSPETEAQRDSNAPLVVVLLGPTASGKTALALELAERFDLEIINVDSRQLYQEMSVGTAKPSPEQQARIRHHLLDLRPPDQPITLQEFQEEALQAVNQSLAKRGAAFLVGGSGLYLKALTAGLRPPAVAPQPALRRQLAQLGQPLCHQLLNTADPEAAVRIASADALRTQRALEVLYATGAPMSRQTSASPPPWRVLELGLNPLDLRQRISARTQALYSQGLVEETRQLRERYGPELPLLQTIGYGEALQVLAGDLSRPAAIAHTTRRTQQFAKRQRTWFRRQHQPHWLPDDNPLNEAGRLIEAGLG

SEQ ID NO: 187 - DNA, 900 bp, Synechococcus sp.
ttgacgcagccagaacccttggtgatcacgttgctggggcccaccgccagcggcaaaacagccctgtcgctggagatcgctgaacggctcaatctgccggtgatcaacgtggattccaggcagctgtaccgggagatgaccgtgggcaccgccaaaccgacggcggagcaacgggcgcgggtgccacaccatttgctggatctacgcaaccccgatcagccgatcaccctgcaggaatttcaggcggaggccgagccctgcatccagcgtgagctgcaaagcaggggcatggcactgctggtggggggtagtggcttgtatctcaaggccctcaccagtggcctcaaaccaccggcggtgccaccgcaggcgcagctgcgtgagcagctgagccaattgggtcaagcgatctgccatccgctgctccagcaggccgatccaacggccggcgccaagatcgcccccgctgatgccgtacgcacccaacgggctctggaggtgctgtacgccaccggtcgaccgatgagcagccaggccacagctacaccaccgccctggcgggttttggaactggggctagatcctgccaacctgcgccagcgcattcagcagcgcaccgaccagctctacagcgacgggttggtggaggagacccggcaactttcggagcgctacggcgctgatctgccattgctgcagaccattggctacggcgaggccctgcagctcctcgaaggaacgatgaaccaggcgaaagccaaccgaatcaccacccagcgcacgcggcaattcgccaagcgtcagcgcacctggttccggcgccagcaccagccccattggctggcgccggctacagaacttgatcaggcgatgacgttgatcgagcagcatctaaggtga

SEQ ID NO: 188 - protein, 299 aa, Synechococcus sp.
MTQPEPLVITLLGPTASGKTALSLEIAERLNLPVINVDSRQLYREMTVGTAKPTAEQRARVPHHLLDLRNPDQPITLQEFQAEAEPCIQRELQSRGMALLVGGSGLYLKALTSGLKPPAVPPQAQLREQLSQLGQAICHPLLQQADPTAGAKIAPADAVRTQRALEVLYATGRPMSSQATATPPPWRVLELGLDPANLRQRIQQRTDQLYSDGLVEETRQLSERYGADLPLLQTIGYGEALQLLEGTMNQAKANRITTQRTRQFAKRQRTWFRRQHQPHWLAPATELDQAMTLIEQHLR

SEQ ID NO: 189 - DNA, 933 bp, Synechococcus sp.
atgaatcagatcaactctgaatttggccccgatgccggtgcaaaggcacccctcgttgtggcgctcgttgggccaacggcgagcggcaaaaccgcgctcgcgcttgagcttgctgagcacttccaactggagatcctcaacatcgattctcgccagctttaccgagagatggatatcggcacggccaaacccacagccgagcaacaacagcgcgtcacccatcacctcctcgacctgcgctcccctgatcaaccgatcacgcttcaggaatttcagcaagaagccactgcggccgtgagccaggttctcaaagagcgaggcgttgcttttttagctggaggcagcggcttgtacctcaaggctctcacccaaggactgcagcctccagccgtgcctcctcaagccgagcttcgccgccagctgagctcactcggtcaagcgaactgccaccagctcctccaacaggccgatccccaagcagccgccaagatcgcccctgccgatgcggttcgcacccaacgtgctctggaggtgctgtactccagcggcaaaccgatgagcgcgcaacagtcgaccaatcccccgccctggcgcgtactggagctcggactcaatcccatggagctgcgctcacgcatcgcccaacggactctccagatttatcaggaaggcttgcttgaagaaacgcggcagctgagccagcgctatgggcctgacctccccatgctgcaaacgatcggctacggcgaagcactagaggtgctgcaaggaggcctaagcgaagctcaggctatcgctaccaccacccgccgcacccagcagtttgccaagcgtcaacgcacctggttccgccgccaacacagtccccactggctcacaggtcaggatgccctcagcgaagcgatacgtctgatcgaagcgggtctaggctga

SEQ ID NO: 190 - protein, 310 aa, Synechococcus sp.
MNQINSEFGPDAGAKAPLVVALVGPTASGKTALALELAEHFQLEILNIDSRQLYREMDIGTAKPTAEQQQRVTHHLLDLRSPDQPITLQEFQQEATAAVSQVLKERGVAFLAGGSGLYLKALTQGLQPPAVPPQAELRRQLSSLGQANCHQLLQQADPQAAAKIAPADAVRTQRALEVLYSSGKPMSAQQSTNPPPWRVLELGLNPMELRSRIAQRTLQIYQEGLLEETRQLSQRYGPDLPMLQTIGYGEALEVLQGGLSEAQAIATTTRRTQQFAKRQRTWFRRQHSPHWLTGQDALSEAIRLIEAGLG

SEQ ID NO: 191 - DNA, 900 bp, Synechococcus sp.
ttgaacagctccaaccccctggtgatcaccctgctcgggcccaccgccagcggcaagaccgccctggcgttggacatcgccgaacggctggatctgccggtgttcaacgtggattcccgccagctctacagggagatggacatcggaaccgctaagccgacggcggagcaacaggcgcggataccgcaccatctgctggacctgcgcacgcccgatcagccgatcacgctgcaggaatttcaggcgatcgccaccccctgcatcaacgctgctctagagcagcgggacgtggcgctgctggtgggcggcagcggcctctatctcaaggccctcaccagcggtcttcagcctcctgccgtggcaccccagccgcaactgcgccagcagctgacggccctgggccagcagatctgccatcccctgctgcaggccgccgaccccaaggccgctgccaaaatcgcccctgccgatgccgtgcgcacccaacgcgcccttgaggtgctctacggctccgggcaaccgatgagccggcaggccacagccgcccctccgccctggcgggtgctggaactgggcctcaaccccgccaacctgcgccaacgcatccagcaacgtaccgagcagctctaccgcgatgggctggtggacgagacccagcgcctgagcgagcgctacggcgctgatctgccattgctgcagaccatcggctacagcgaagcgctgcagatgattggcggcagcctgaccacaacagaagcggtgcgaatcaccagccaacgcacccgccagttcgccaaacgccaacgcacctggttccggcgtcagcacaacccccactggctgcccgaccaggcaacgctgacggatgcgatgacgttgatcgaacaacatctaaggtga

SEQ ID NO: 192 - protein, 299 aa, Synechococcus sp.
MNSSNPLVITLLGPTASGKTALALDIAERLDLPVFNVDSRQLYREMDIGTAKPTAEQQARIPHHLLDLRTPDQPITLQEFQAIATPCINAALEQRDVALLVGGSGLYLKALTSGLQPPAVAPQPQLRQQLTALGQQICHPLLQAADPKAAAKIAPADAVRTQRALEVLYGSGQPMSRQATAAPPPWRVLELGLNPANLRQRIQQRTEQLYRDGLVDETQRLSERYGADLPLLQTIGYSEALQMIGGSLTTTEAVRITSQRTRQFAKRQRTWFRRQHNPHWLPDQATLTDAMTLIEQHLR

SEQ ID NO: 193 - DNA, 897 bp, Synechococcus sp.
atgtccacacaacctctcgtgatcaccttgctggggcccaccgccagcggcaaaaccgccctcgcccttgagctggccgaacggctcgggctgccagtgatcaacgtggattcccgccagctgtatcgggagatggacgtgggcaccgccaaacccacagccgaacaacaggcccgggtgacgcaccacttactcgacctgcgcgatcccaaccagccgatcacgctgcaggagtttcaagcggaagccacgccctgcattgagcgtgaactaagcgaacggggcatcgctctacttgtggggggcagcggtttgtacctgaaagccttaacaagcggtctcaaaccaccagctgtgggcccgcaaccagagctgcgtaagcaattcagtgccatgggacaagccgtctgccatccgctcttggccgccgcggatccaatagccgctgcaaaaatttcccctgcggatgtggtccgcacccagcgcgcccttgaggtgctctacgcctcaggccaaccgatgagtggtcaggccagcgtggaacctcccccctggagaattttggaactcggcctaaatcccaccaacctgcgccaacgcatcaaccaacgcactgaacagctgtatcaagacggattagtggaggaaacccaacgcttggccgaccgctacggagccgacttaccgctgctgcaaacgatcggctacggagaagcactgcaaatcaacgatggatcgatcacaaggcaggcggcgatcgccaccacctgccagcgcacacggcaattcgccaaacgtcaacgcacctggtttcggcgccaacacactccccaatggctcagtgaacaggatctgttaacggaagcgatgacgctgatcgaacaacacctaggctga

SEQ ID NO: 194 - protein, 298 aa, Synechococcus sp.
MSTQPLVITLLGPTASGKTALALELAERLGLPVINVDSRQLYREMDVGTAKPTAEQQARVTHHLLDLRDPNQPITLQEFQAEATPCIERELSERGIALLVGGSGLYLKALTSGLKPPAVGPQPELRKQFSAMGQAVCHPLLAAADPIAAAKISPADVVRTQRALEVLYASGQPMSGQASVEPPPWRILELGLNPTNLRQRINQRTEQLYQDGLVEETQRLADRYGADLPLLQTIGYGEALQINDGSITRQAAIATTCQRTRQFAKRQRTWFRRQHTPQWLSEQDLLTEAMTLIEQHLG

SEQ ID NO: 195 - DNA, 939 bp, Thermosynechococcus elongatus
gtgggggatgcagggctaattgttattgggggggcaacggctacaggcaaaacggcgctagcgatcgcccttgcccaacaattgaatagtgtcattttgagtgccgactcccgccaagtctaccgcggctttgatattggcacagccaagcccactccagcccagcaacagcaggtgcgccatcacctcatcgatatttgtgacccccgcgagacgctgaccctagcaatttaccaagccaaggctcaagccctgattgcccactaccacgcccaagggatcacgcccctcttggtgggggggacaggattgtatatccgcagcattacccaagggctaacaatgccccaagtcccaccgcaaccccatctacgggctcaattgatggctctgggtcagcaggaatgctatcagtggcttcagcaggtggatcctgtggcggcgcaacggatccatgcccacgatcaagtgcgtaccctgcgagccttggaggtctattacaccactggggtgcccctcagccagcagcaacggcgcgaaccgcctccctaccggatttggtactttgccctcacggggggcgatcgccagcaagagcgctgccgtattgaagcccgcactcaggagatgctagccatgggctggctcgatgaaattcagcaactgcaaaggcagtacggcgaggatttgcccctcctagacaccttgggctatcgggaaatgcgccaatatctgcggggagaagtcaccctcgcggaggctattgccctcacagtgcagcacacccaacaatttgccaaacggcagcggacatggttccgggcagaacctgacatccattggctgcaagccaccaccctagaggcgcaactggcagagattcaagcacaattcactctctgtcccaagaccactgcaacaaagcggcggatgagctga

SEQ ID NO: 196 - protein, 312 aa, Thermosynechococcus elongatus
MGDAGLIVIGGATATGKTALAIALAQQLNSVILSADSRQVYRGFDIGTAKPTPAQQQQVRHHLIDICDPRETLTLAIYQAKAQALIAHYHAQGITPLLVGGTGLYIRSITQGLTMPQVPPQPHLRAQLMALGQQECYQWLQQVDPVAAQRIHAHDQVRTLRALEVYYTTGVPLSQQQRREPPPYRIWYFALTGGDRQQERCRIEARTQEMLAMGWLDEIQQLQRQYGEDLPLLDTLGYREMRQYLRGEVTLAEAIALTVQHTQQFAKRQRTWFRAEPDIHWLQATTLEAQLAEIQAQFTLCPKTTATKRRMS

SEQ ID NO: 197 - DNA, 930 bp, Trichodesmium erythraeum
ttgactttaattactatttgcggtccaactgctacaggtaagtctggattggccttagatttggcccataggttgggttcaataattctgagtgcagactcccgtcagatatataaatattttaacattggaacggcaaaaccaactataaaagaacaacagttagtatctcattatttaatagatatctgtgaacctacagagattttgactttagcagaataccagaaacaggcgcaaagctttattcagtctcctggttctcaaactgatgtggtattgccaacattattggtggggggtactggtttatacattaaggcaatagttaagggtttgaaaattcctagggtggggcctaatgaaaagttgcgatcgcaattagcaaatttaggtcaaaaacaatgttacaaaatgttgcagcaggttgatcaggttgccgttgagaaaattcacccgaatgatgtggtccgaactttacgagcattggaggtattttatgtgagtgggaaaccaatttctcaacagcagggagaagaccttccaaattatccaattttgcaaatagggttagactgtgatgtagaagttttgggggaacgtattcgtgatcggactgagaaaatggtggaagttgggttagtggaggaagtcaagtgtttgtgtgaaaaatatggtgagaagttgcctttattaaatactttaggttatgcagaaatgaaacaatatttggcgggagatatttccttggctgaagcgatcaaagcaacagttttacatactcgtcagtttgccaagcgacaacgcacttggtttcgaggatatccagaaattgaatggtttgatgggaatgccccaaatttattggacaaggtttgggagcgggtgagggagtttactagaatactggcagaaaagacacaggagtga

SEQ ID NO: 198 - protein, 309 aa, Trichodesmium erythraeum
MTLITICGPTATGKSGLALDLAHRLGSIILSADSRQIYKYFNIGTAKPTIKEQQLVSHYLIDICEPTEILTLAEYQKQAQSFIQSPGSQTDVVLPTLLVGGTGLYIKAIVKGLKIPRVGPNEKLRSQLANLGQKQCYKMLQQVDQVAVEKIHPNDVVRTLRALEVFYVSGKPISQQQGEDLPNYPILQIGLDCDVEVLGERIRDRTEKMVEVGLVEEVKCLCEKYGEKLPLLNTLGYAEMKQYLAGDISLAEAIKATVLHTRQFAKRQRTWFRGYPEIEWFDGNAPNLLDKVWERVREFTRILAEKTQE

SEQ ID NO: 199 - protein, 8 aa, Artificial sequence
  ATP/GTP-binding motif A
  VARIANT (2)..(2): Xaa can be Pro or Ala or Thr
  VARIANT (5)..(5): Xaa can be Ala or Thr or Ser
  VARIANT (8)..(8): Xaa can be Ser or Thr
GXTAXGKX

SEQ ID NO: 200 - protein, 5 aa, Artificial sequence
  conserved motif I of IPPT polypeptides
  VARIANT (4)..(4): Xaa can be Gln or Leu
  VARIANT (5)..(5): Xaa can be Val or Leu or Ile
DSRXX

SEQ ID NO: 201 - protein, 8 aa, Artificial sequence
  conserved motif II of IPPT polypeptides
  VARIANT (1)..(1): Xaa can be Asn or Asp or Ser or Thr
  VARIANT (2)..(2): Xaa can be Ile or Val
  VARIANT (8)..(8): Xaa can be Thr or Ser
XXGTAKPX

SEQ ID NO: 202 - protein, 8 aa, Artificial sequence
  conserved motif III of IPPT polypeptides
  VARIANT (2)..(2): Xaa can be Val or Ala or Ile
  VARIANT (5)..(5): Xaa can be Ser or Thr
LXGGXGLY

SEQ ID NO: 203 - protein, 10 aa, Artificial sequence
  conserved motif IV of IPPT polypeptides
  VARIANT (1)..(1): Xaa can be Phe or Tyr or Leu
  VARIANT (4)..(4): Xaa can be Arg or Lys or Gln
  VARIANT (6)..(6): Xaa can be Arg or Lys or Met
XAKXQXTWFR

SEQ ID NO: 204 - DNA, 1553 bp, Oryza sativa
gtcaccaccgtcatgtacgaggctgctccaccactgcctcactcgccaccagcgtctcccgccgcgtgcaatacaagaagaaacatcgaacggtcatataaggtaagacccactaccgatttaacctatccttcccacaatctaatccactcatttctcctcccacgatcttattctctcatttctcctcactatttttgcatttgtaggaaacacaatgacaccgtcgaagaaagctggtggagcaccgtagccagcaatcaccaaaacacagaggggaggaggtcggcagcggccatgcggacggcgacgagacaacgtgacgcaaagagggaggaggacgttggcgatcatgctggtgttggcggaggaggtcactggccacgcggatgacagcggggcagcgcaacacaaaaaggggggaggatgccggcgaccacgctagtgaccatgaagcaagatgatgtgaaagggaggaccggacgagggttggacctctgccgctgacatgaagagcgtgatgtgtagaaggagatgttagaccagatgccgacgcaactagccctgcaaggtcacccgactgatatcgctgcttgcccttgtcctcatgtacacaatcagcttgcttatctctccatactggtcgtttgtttcccgtggccgaaatagaagaagacagaggtaggttttgttagagaattttagtggtattgtagcctatttgtaattttgttgtactttattgtattaatcaataaaggtgtttcattctattttgactcaatgttgaatccattgatctcttggtgttgcactcagtatgttagaatattacattccgttgaaacaatcttggttaagggttggaacatttttatctgttcgtgaaacatccgtaatattttcgttgaaacaatttttatcgacagcaccgtccaacaatttacaccaatttggacgtgtgatacatagcagtccccaagtgaaactgaccaccagttgaaaggtatacaaagtgaacttattcatctaaaagaccgcagagatgggccgtggccgtggctgcgaaacgcagcgttcaggcccatgagcatttattttttaaaaaaatatttcacaacaaaaaagagaacggataaaatccatcgaaaaaaaaaactttcctacgcatcctctcctatctccatccacggcgagcactcatccaaaccgtccatccacgcgcacagtacacacacatagttatcgtctctccccccgatgagtcaccacccgtgtcttcgagaaacgcctcgcccgacaccgtacgtggcgccaccgccgcgcctgccgcctggacacgtccggctcctctccacgccgcgctggccaccgtccaccggctcccgcacacgtctccctgtctccctccacccatgccgtggcaatcgagctcatctcctcgcctcctccggcttataaatggcggccaccaccttcacctgcttgcacaccacagcaagagctaagtgagctagccactgatcagaagaacacctcgatctctgagagtg

SEQ ID NO: 205 - DNA, 1300 bp, Oryza sativa
ttcttctgaagctgaagccctgcgaaataggcctttaaacgctttaaggttactggatgatcatatcggcgtaagaccggtttaaacatggtttcgctttgtgaatccaatgtgagtcacgacgtgacacatggcacgtccttggagctttagacatatcgaatctgagcactggagtggccgagtgggtgagcggccaaatccgttttagacagatcgcactgacacgatgttgatcattgatactaataccattttatcaagcagtagtgttgaaaaaaaaacttatgttctcttcaactgtgagatttcatcccgtttcaagatgaacaagccatgcatgtgagatgtgaacagaaggcagaagacagtggaaagacaggacaaataagtgaagagggatcaaatcaatgggcctgacggtttctgaaagttgacatggaaatcgccggtgatcaccggtttatacgttatttaaatctgcgatttccactttcgtttgctttcggggttccgatttgagtcacgcacatattcttcatcgtgctttggatctcagcaccgtagtaacttttggacaaattgcattcgccgacactaataacatgttctctttatgctgctttacatatactgcttatccacacccaatcccatgttcatatattatgagatggagggagtaaactttgttaacagcaacattttttatattaaagcatcaactaattaaagcacaagatacgcatgttatctcaataaatcttccagtgcatgtataaagaagatgtcgccgctaacttagataatttttgtgacctttatcctggccggcataattaattcttccggaaattaaaagctagtttttccatattcatcagtacagacaagacagcatagtaagcgaagcatacctgacgtgttagctcattgtaactcgatctggaacactcgatgctagacacagacagacactcctcgtgatgaacgttagcatttagcaacatacggtgataaagcagctggggatcgatccatccatccatcgtctttacacgtacttaccttgctaaccgcactgtcgactcttgcatgtttgcatgtaatccaaatggaccccacgtggaacatgctcacagtgctttgcagctgctttccaaaatgctttctttcacttcttccattcctctgtccacaaaaaaagtagtgtgttcttgagcctatataagagagggtcacacgctccagtcgactcaccatcgatccatctgacggttagttccaagggaaagaagaa

SEQ ID NO: 206 - DNA, 55 bp, Artificial sequence
  primer: prm07646
ggggacaagtttgtacaaaaaagcaggcttaaacaatggaatcgcgtttgaaacc

SEQ ID NO: 207 - DNA, 50 bp, Artificial sequence
  primer: prm07645
ggggaccactttgtacaagaaagctgggttcaaacgccctcactctttcg

SEQ ID NO: 208 - DNA, 1727 bp, Arabidopsis thaliana
caatgcttttttataatgccaactttgtacaaaaaagcaggcttaaacaatggatactctctttagactagtctgtctccaacaacaacaacaatccgatagtatcattacaaatcaatcttcgttaagcagaacttccaccaccactactggctctccacaaactgcttgtcactacaactttccacaaaacgacgtcgtcgaagaatgcttcaactttttcatggatgaagaagacctttcctcttcttcttctcaccacaaccatcacaaccacaacaatcctaatacttactactctcctttcactactcccacccaataccatcccgccacatcatcaaccccttcctccaccgccgcagccgcagctttagcctcgccttactcctcctccggccaccataatgacccttccgcgttctccatacctcaaactcctccgtccttcgacttctcagccaatgccaagtgggcagactcggtccttcttgaagcggcacgtgccttctccgacaaagacactgcacgtgcgcaacaaatcctatggacgctcaacgagctctcttctccgtacggagacaccgagcaaaaactggcttcttacttcctccaagctctcttcaaccgcatgaccggttcaggcgaacgatgctaccgaaccatggtaacagctgcagccacagagaagacttgctccttcgagtcaacgcgaaaaactgtactaaagttccaagaagttagcccctgggccacgtttggacacgtggcggcaaacggagcaatcttggaagcagtagacggagaggcaaagatccacatcgttgacataagctccacgttttgcactcaatggccgactcttctagaagctttagccacaagatcagacgacacgcctcacctaaggctaaccacagttgtcgtggccaacaagtttgtcaacgatcaaacggcgtcgcatcggatgatgaaagagatcggaaaccgaatggagaaattcgctaggcttatgggagttcctttcaaatttaacattattcatcacgttggagatttatctgagtttgatctcaacgaactcgacgttaaaccagacgaagtcttggccattaactgcgtaggcgcgatgcatgggatcgcttcacgtggaagccctagagacgctgtgatatcgagtttccgacggttaagaccgaggattgtgacggtcgtagaagaagaagctgatcttgtcggagaagaagaaggtggctttgatgatgagttcttgagagggtttggagaatgtttacgatggtttagggtttgcttcgagtcatgggaagagagttttccaaggacgagcaacgagaggttgatactagagcgtgcagcgggacgtgcgatcgttgatcttgtggcttgtgagccgtcggattccacggagaggcgagagacagcgaggaagtggtcgaggaggatgaggaatagtgggtttggagcggtggggtatagtgatgaggtggcggatgatgtcagagctttgttgaggagatataaagaaggtgtttggtcgatggtacagtgtcctgatgccgccggaatattcctttgttggagagatcagccggtggtttgggctagtgcgtggcggccaacgtaaagggttgtttttatttacccagctttcttgtacaaagttggcattataagaaagcattgcttatcaatttgttgcaacgaac

SEQ ID NO: 209 - protein, 531 aa, Arabidopsis thaliana
MDTLFRLVCLQQQQQSDSIITNQSSLSRTSTTTTGSPQTACHYNFPQNDVVEECFNFFMDEEDLSSSSSHHNHHNHNNPNTYYSPFTTPTQYHPATSSTPSSTAAAAALASPYSSSGHHNDPSAFSIPQTPPSFDFSANAKWADSVLLEAARAFSDKDTARAQQILWTLNELSSPYGDTEQKLASYFLQALFNRMTGSGERCYRTMVTAAATEKTCSFESTRKTVLKFQEVSPWATFGHVAANGAILEAVDGEAKIHIVDISSTFCTQWPTLLEALATRSDDTPHLRLTTVVVANKFVNDQTASHRMMKEIGNRMEKFARLMGVPFKFNIIHHVGDLSEFDLNELDVKPDEVLAINCVGAMHGIASRGSPRDAVISSFRRLRPRIVTVVEEEADLVGEEEGGFDDEFLRGFGECLRWFRVCFESWEESFPRTSNERLILERAAGRAIVDLVACEPSDSTERRETARKWSRRMRNSGFGAVGYSDEVADDVRALLRRYKEGVWSMVQCPDAAGIFLCWRDQPVVWASAWRPT

SEQ ID NO: 210 - DNA, 1596 bp, Arabidopsis thaliana
atggatactctctttagactagtcagtctccaacaacaacaacaatccgatagtatcattacaaatcaatcttcgttaagcagaacttccaccaccactactggctctccacaaactgcttatcactacaactttccacaaaacgacgtcgtcgaagaatgcttcaactttttcatggatgaagaagacctttcctcttcttcttctcaccacaaccatcacaaccacaacaatcctaatacttactactctcctttcactactcccacccaataccatcccgccacatcatcaaccccttcctccaccgccgcagccgcagctttagcctcgccttactcctcctccggccaccataatgacccttccgcgttctccatacctcaaactcctccgtccttcgacttctcagccaatgccaagtgggcagactcggtccttcttgaagcggcacgtgccttctccgacaaagacactgcacgtgcgcaacaaatcctatggacgctcaacgagctctcttctccgtacggagacaccgagcaaaaactggcttcttacttcctccaagctctcttcaaccgcatgaccggttcaggcgaacgatgctaccgaaccatggtaacagctgcagccacagagaagacttgctccttcgagtcaacgcgaaaaactgtactaaagttccaagaagttagcccctgggccacgtttggacacgtggcggcaaacggagcaatcttggaagcagtagacggagaggcaaagatccacatcgttgacataagctccacgttttgcactcaatggccgactcttctagaagctttagccacaagatcagacgacacgcctcacctaaggctaaccacagttgtcgtggccaacaagtttgtcaacgatcaaacggcgtcgcatcggatgatgaaagagatcggaaaccgaatggagaaattcgctaggcttatgggagttcctttcaaatttaacattattcatcacgttggagatttatctgagtttgatctcaacgaactcgacgttaaaccagacgaagtcttggccattaactgcgtaggcgcgatgcatgggatcgcttcacgtggaagccctagagacgctgtgatatcgagtttccgacggttaagaccgaggattgtgacggtcgtagaagaagaagctgatcttgtcggagaagaagaaggtggctttgatgatgagttcttgagagggtttggagaatgtttacgatggtttagggtttgcttcgagtcatgggaagagagttttccaaggacgagcaacgagaggttgatgctagagcgtgcagcgggacgtgcgatcgttgatcttgtggcttgtgagccgtcggattccacggagaggcgagagacagcgaggaagtggtcgaggaggatgaggaatagtgggtttggagcggtggggtatagtgatgaggtggcggatgatgtcagagctttgttgaggagatataaagaaggtgtttggtcgatggtacagtgtcctgatgccgccggaatattcctttgttggagagatcagccggtggtttgggctagtgcgtggcggccaacgtaa

SEQ ID NO: 211 - protein, 531 aa, Arabidopsis thaliana
MDTLFRLVSLQQQQQSDSIITNQSSLSRTSTTTTGSPQTAYHYNFPQNDVVEECFNFFMDEEDLSSSSSHHNHHNHNNPNTYYSPFTTPTQYHPATSSTPSSTAAAAALASPYSSSGHHNDPSAFSIPQTPPSFDFSANAKWADSVLLEAARAFSDKDTARAQQILWTLNELSSPYGDTEQKLASYFLQALFNRMTGSGERCYRTMVTAAATEKTCSFESTRKTVLKFQEVSPWATFGHVAANGAILEAVDGEAKIHIVDISSTFCTQWPTLLEALATRSDDTPHLRLTTVVVANKFVNDQTASHRMMKEIGNRMEKFARLMGVPFKFNIIHHVGDLSEFDLNELDVKPDEVLAINCVGAMHGIASRGSPRDAVISSFRRLRPRIVTVVEEEADLVGEEEGGFDDEFLRGFGECLRWFRVCFESWEESFPRTSNERLMLERAAGRAIVDLVACEPSDSTERRETARKWSRRMRNSGFGAVGYSDEVADDVRALLRRYKEGVWSMVQCPDAAGIFLCWRDQPVVWASAWRPT

SEQ ID NO: 212 - DNA, 1509 bp, Pinus taeda
atggatagattgttcacctccagattagcagattatcaatccgaacaccctctgtcatgcttcaattctaacaaaaattgtgaagatgcagacacccctagacacatagacagctacaacaaccatctcagccagtttgttctcccatccagaagggataaatcaaggcaatgcaattctttcatggaggacgaagacttctcattcaagcaattccttcctttcaaagaaatgttcaacagcaatcagaccggaaagggtaccacgggacctaaccaatttagcggcactagggctacttctagcagatcaagtgaagtaccagaccccagcttgttttctgaactgaaccctaattttccagaggagtttggaccagcaggatcacgtcgatgggcttcaaatcttctgctagaatgtgccagagcaatagcagagaatgaaaaaagccgaacccaacatctgctatggatgctaaatgaactatcatctccctatggggattgtgagcagaaattggcctcgtacttcttgcaggcctttttttgcaaaataacagatactggtcctcgttgctacaccacactttgttcagctgctgaaaaaacatactcatttgattccacaagaaaaatgatcttgaaattccaggaatcaagcccatggacaacctttggtcatgttgctgccaatggagcaatcctggagtcctttgagggagaaatgaagctgcacatagttgacctgagcaacactttttgcacacagtggcctactttgttagaggccttggccaccagaagtgatgacacccctcatcttaggttgactactgtagtcaccagcaaggaagccacagcaatgaaggtcatgaaggaaatagggcaaagaatggagaaatttgcacggctcatgggggttccatttgaattcagtgttattcatcaacaacatctccacaagctcaacgttggtgcccttaaaatcagaccagatgaagctctggccatcaactgcatccacagcctgcaacgtgttatcaagaatggaagggattccatattgtccacgttctacagcatgaaccccaagatagttactgttgtagaggacgaagtagacctgactcatgaagattttggtgattgttttagtgaatgccttcgttttttttccttgttttttgattctctagaggagagcttctccagaaccagcaacgagagattaatgcttgaaagaaccagtgcaaggagcattgtgaacatattggcctgtgaggattctgaagtttatgagcgcagggaaaagggtgcacagtgggcttggaggctcaaggaggcaggatttatacatgctgcattcagtgatgatgttgttgatgatgttagggctcttctcaagagatacaaggagggttggggtcactgtagcaattcagatgggcttttcttgacctggaaggagcagtgcgccatttgggcttctgcctggaagccatgcttgtaa

SEQ ID NO: 213 - protein, 502 aa, Pinus taeda
MDRLFTSRLADYQSEHPLSCFNSNKNCEDADTPRHIDSYNNHLSQFVLPSRRDKSRQCNSFMEDEDFSFKQFLPFKEMFNSNQTGKGTTGPNQFSGTRATSSRSSEVPDPSLFSELNPNFPEEFGPAGSRRWASNLLLECARAIAENEKSRTQHLLWMLNELSSPYGDCEQKLASYFLQAFFCKITDTGPRCYTTLCSAAEKTYSFDSTRKMILKFQESSPWTTFGHVAANGAILESFEGEMKLHIVDLSNTFCTQWPTLLEALATRSDDTPHLRLTTVVTSKEATAMKVMKEIGQRMEKFARLMGVPFEFSVIHQQHLHKLNVGALKIRPDEALAINCIHSLQRVIKNGRDSILSTFYSMNPKIVTVVEDEVDLTHEDFGDCFSECLRFFSLFFDSLEESFSRTSNERLMLERTSARSIVNILACEDSEVYERREKGAQWAWRLKEAGFIHAAFSDDVVDDVRALLKRYKEGWGHCSNSDGLFLTWKEQCAIWASAWKPCL

SEQ ID NO: 214 - DNA, 1131 bp, Physcomitrella patens
tgggccaaagctcttcttctggactgtgcaagagctatagctgagaaagacacttcgcgcgttcaaagcattatgtggattttgaacgagagtgcatctccatacggagattccgaccaaagacttatgtcatatttcgtccaagcacttgtctgcaagatcacagacacgggctctcgatgccaccgaagtctaacttccgccgccgaaaagacgtattcctttgaatcgatgcgaaatatgatccttaactttcagcagaatgcgagcccctggacaacttttgggcatgttgctgcaaacggagctcttctggagacgatggaaggggagtccaagatacatatcattgacatcagcagtacattgtgtacgcaatggccaacctttctggaagctctagcaacgcggacggatataacccctcacctccgcctcacatgcatcgtgatatcacccgaagaagcagcgttgagggtgatgaaacaagtcatgaacagaatagacaggtttgccagactgatgggagtgccgttcgagagcacggtgatccataaacctcacttggaaacgttggatctggatgagctgaacttgcgggaaggtgaagctctcgctgtgaattgcgttcagactctacaccacatctccgagtgtgtagcagccgaggagcagtacagtcctcgagaccgaattctgtccactttccggagtgccaaacccaagattctgtcgatcgtggaggatgaagctaacatgatctcaccagacttccttggttgcttccgggaggcccttagattttactcgctcttatttgaatctttggaggagagctttccccgagccagcaacgagcgtctcatgcttgagcgaaattgcgcccgcaagctggtgaatatgctaagttttgacgccacggagagtacagaaagacaagagaaagggattcattgggattaccgactacgaaaagtgggctttgagcccgtgtcattcagtcacgacgtggtggatgacgttcaagctctactcaagagatacaagaaggggtggggtcttgacatcaccgatgccaggctttaccttacctggaaggaacaagcagttatttgcagcaccacatggaag

SEQ ID NO: 215 - protein, 377 aa, Physcomitrella patens
WAKALLLDCARAIAEKDTSRVQSIMWILNESASPYGDSDQRLMSYFVQALVCKITDTGSRCHRSLTSAAEKTYSFESMRNMILNFQQNASPWTTFGHVAANGALLETMEGESKIHIIDISSTLCTQWPTFLEALATRTDITPHLRLTCIVISPEEAALRVMKQVMNRIDRFARLMGVPFESTVIHKPHLETLDLDELNLREGEALAVNCVQTLHHISECVAAEEQYSPRDRILSTFRSAKPKILSIVEDEANMISPDFLGCFREALRFYSLLFESLEESFPRASNERLMLERNCARKLVNMLSFDATESTERQEKGIHWDYRLRKVGFEPVSFSHDVVDDVQALLKRYKKGWGLDITDARLYLTWKEQAVICSTTWK

SEQ ID NO: 216 - DNA, 1116 bp, Physcomitrella patens
ctactggtagaatgtgcgagggcaatcactgcaaatgattccgctcgtgtgaagaacttgatgtgggtgttgaatgagctgggctctccgtacggagacgctgaccaaagagtagctgcatatttcctgcaggctttgttttgtaagatcaccaatacgggatctagctgctaccgcgcactcactgctgctgcggagaggacctattcgttcgatacattacgaaaaatgattctcgactaccaggaggcaagtccgtggacaactttcggtcatacagctggaaacggagctatgatggaggcctttgaaggtgagacaaaaattcacattgtggacatgagcagcacctattgcacccaatggccgatccttttcgaagctctagcaacacgagctgagggtacacctcacctacgcctgagcaccatcgtcatatcccccgaggagtctgccttacaggtgatgaagcagattatgaccaggttggaaagatttgctagacttatgggtgttccatttgagtacgttgtaaagcatgaaccacaactggagaaattggaacttgcagcgctggacctgcggcaggacgaagtcctcgccatcacgtgcaatcacactcttcatcacgtgtcggagattgtgccacgaggagagcagtacagtccgcgcgatgtgctcctgtgcaccttccgaaacgcaaatccgaagattatgatccttgtggaggaagaagtggatctgacttcgccagattttattgtttgtttctgtgaggcgctcaagttttattccctcttgtttgaatccctggaggagaacttccccagaactagcaacgaacgtttaatcctggagcggatttgtgcacggaacctggtcaatctgataggttgtgaccctccagagaacgttgagaggcaggagacgggaatccagtgggatctccgtttgaaaagaataggcttcgtgccctgccccttcagcgacgatgttgttgacgacgttcgtgcgctcctcaagaggtacaaagagggatggagcctgagcatgaacgagaacagactttacctagcgtggaaagagcaggtggttctatgcgccactgcttggaag

SEQ ID NO: 217 - protein, 372 aa, Physcomitrella patens
LLVECARAITANDSARVKNLMWVLNELGSPYGDADQRVAAYFLQALFCKITNTGSSCYRALTAAAERTYSFDTLRKMILDYQEASPWTTFGHTAGNGAMMEAFEGETKIHIVDMSSTYCTQWPILFEALATRAEGTPHLRLSTIVISPEESALQVMKQIMTRLERFARLMGVPFEYVVKHEPQLEKLELAALDLRQDEVLAITCNHTLHHVSEIVPRGEQYSPRDVLLCTFRNANPKIMILVEEEVDLTSPDFIVCFCEALKFYSLLFESLEENFPRTSNERLILERICARNLVNLIGCDPPENVERQETGIQWDLRLKRIGFVPCPFSDDVVDDVRALLKRYKEGWSLSMNENRLYLAWKEQVVLCATAWK

SEQ ID NO: 218 - DNA, 1812 bp, Oryza sativa
atggataccctcttcaggttggttagcctccaccaccatcaccaccaccagcacgcggcctcaccgtcgccgccggaccagccgcacaagtcgtacccctcctcgcgagggagcaccagctccccctcctcccaccacacccacaaccacacctactaccaccactcccactcccactacaacaataatagcaacaccaactactattaccagggtggtggaggcggcggcggagggtactactacgcggaggagcagcagccggcggcgtacctagaagaatgcggcaacggccaccagttttacatggatgaagacttctcctcctcgtcttcctcccgccagttccactcgggaacgggcgcgccgtcgtcggcgccggtgcctcctcctccgtcggcgacgacgtcgtccgcgggcgggcacgggctgtttgaggcggcggacttctcgttcccgcaggttgatatcagcctcgacttcggcggctctccggccgttccgtcgtcgtccggtgctggcgccggcgccggggcagcgccgtcgtcgtcggggaggtgggcggcgcagctgctgatggagtgcgcgcgcgcggtggcggggcgcgacagccagcgcgtgcagcagctcatgtggatgctcaacgagctggcctcgccgtacggcgacgtcgaccagaagctggcctcctacttcctgcagggcctcttcgcgcggctcaccacctccggcccgcgcacgctgcggacgctcgccaccgcgtcggaccggaacgcgtcgttcgactccacgcgccgcacggcgctcaagttccaggagctcagcccgtggacgccgttcgggcacgtcgccgccaacggcgccatactcgagtcgttcctggaggccgcggcggcgggcgccgccgcctcctcctcctcgtcgtcttcatcgtcgacgccgccgacgcggctgcacatcctcgacctgagcaacacgttctgcacgcagtggccgaccctcctggaggcgctggccacccggtcctcggacgacacgccgcacctgtccatcaccaccgtcgtgcccacggcggcgccgtcggcggccgcgcagcgcgtgatgcgggagatcgggcagcgcctcgagaagttcgcgcggctgatgggcgtcccgttcagcttccgcgccgtgcaccactcgggggacctggccgacctcgacctcgccgcgctggacctccgcgagggcggcgccaccgccgcgctcgccgtcaactgcgtaaacgcgctgcgcggggtcgcgcgggggcgcgacgcgttcgtggcgtcgctccggcgcctggagccgcgcgtggtcaccgtcgtggaggaggaggccgacctggcggcgccggaggcggacgcgtcgtcggaggccgacaccgacgccgcgttcgtcaaggtgttcggcgagggcctccgcttcttctcggcgtacatggactcgctggaggagagcttccccaagacaagcaacgagaggctgtcactggagagggcggtcggccgtgccatcgtcgacctcgtgtcatgcccggcctcccagtccgccgagcgccgggagaccgccgcgtcgtgggcgcggcgcatgcggtcggcggggttctcgccggcggcattcagcgaggacgtcgccgacgacgtgcggtcgcttctccggcggtacaaggagggctggtcgatgcgggacgccggcggtgccacggacgacgccgccggcgccgctgctgccggagcgttccttgcgtggaaggagcagcctgtcgtgtgggcgagcgcgtggaagccatga

SEQ ID NO: 219 - protein, 603 aa, Oryza sativa
MDTLFRLVSLHHHHHHQHAASPSPPDQPHKSYPSSRGSTSSPSSHHTHNHTYYHHSHSHYNNNSNTNYYYQGGGGGGGGYYYAEEQQPAAYLEECGNGHQFYMDEDFSSSSSSRQFHSGTGAPSSAPVPPPPSATTSSAGGHGLFEAADFSFPQVDISLDFGGSPAVPSSSGAGAGAGAAPSSSGRWAAQLLMECARAVAGRDSQRVQQLMWMLNELASPYGDVDQKLASYFLQGLFARLTTSGPRTLRTLATASDRNASFDSTRRTALKFQELSPWTPFGHVAANGAILESFLEAAAAGAAASSSSSSSSSTPPTRLHILDLSNTFCTQWPTLLEALATRSSDDTPHLSITTVVPTAAPSAAAQRVMREIGQRLEKFARLMGVPFSFRAVHHSGDLADLDLAALDLREGGATAALAVNCVNALRGVARGRDAFVASLRRLEPRVVTVVEEEADLAAPEADASSEADTDAAFVKVFGEGLRFFSAYMDSLEESFPKTSNERLSLERAVGRAIVDLVSCPASQSAERRETAASWARRMRSAGFSPAAFSEDVADDVRSLLRRYKEGWSMRDAGGATDDAAGAAAAGAFLAWKEQPVVWASAWKP

SEQ ID NO: 220 - DNA, 1809 bp, Oryza sativa
atggatacgctgtttaggttggttagcctccaagccgcctccgagcagcagcagcagcagcagcagtcggcgtcctacaactcgaggagcacgacgtcgagcgggtccaggtcgtcgtcgcaccagacgaacgcgtcctacagctactaccaccacagcagcaacagcggcggcggcggcggaggcggcggagggtactactacggcggccagcagccgccgccgtcgcagtactactacctggagccgtaccaagaagaatgcggcaacgccccacaccaccagctttacatggatgaagacttctcctcctcgtcgtcgtcgaggcacttccaccacggcgcgcgggtgcagcagcagcagccgccggcgtcgtccacgcccacggggacggcgccgacgccgccgctgtcgacctcgtccaccgcggcgggcgccgggcacggcctgttcgaggcggcggacctgtcgttcccgccggacctcaacctcgacttctcgtccccggcgtcgtcgtccggcggcgggacagcgtcgtcgggcgcggttgggggcggcggcggcgggaggtgggctagccagctgctgctggagtgcgcgcggtcggtggccgcccgcgacagccagcgcgtgcagcagctcatgtggatgctcaacgagctcgcgtcgccgtacggcgacgtggagcagaagctggcttcctacttcttgcaggggctgttcgctcggctcacggcgtccgggccgcgcacgctgcgcacgctcgccgcggcgtccgaccggaacacgtcgttcgactcgacgcggcgcacggcgctgcggttccaggagctcagcccctggtcctcgtttgggcacgtcgccgccaatggcgccatcctcgagtccttcctggaggtcgccgccgcggcgtcgtcggagacgcagcggttccacatcctcgacctgagcaacacgttctgcacgcagtggccgacgctgctggaggcgctggccacgcggtccgccgacgagacgccgcacctctcgatcaccaccgtggtgtccgccgcgccgtccgcgcccacggcggcggtgcagcgcgtcatgcgggagatcgggcagcgcatggagaagttcgcgcggctcatgggcgtgcccttccgcttccgcgccgtgcaccactccggggacctcgcggagctcgacctcgacgcgctcgacctccgcgagggcggcgccaccaccgcgctcgccgtcaactgcgtcaactcgctgcgcggcgtggttcccggcagggcccgccggcgcgacgcgttcgcggcgtcgctccgccggctggacccgcgggtcgtcaccgtcgtcgaggaggaggcggacctggtggcgtccgatcccgacgcgtcgtcggcgacggaggaaggcggcgacacggaggcggcgttcctcaaggtgttcggcgagggcttgcgcttcttctcggcgtacatggattcgctcgaggagagcttccccaagacgagcaacgagaggctggcattggagaggggagcagggcgcgccatcgtcgacttggtctcgtgcccggcgtcggagtcgatggagcggcgggagacggcggcgtcgtgggcgcggcgcatgcggtcggccgggttctctccggtggcattcagcgaggacgtcgccgacgacgtgcgatcgctgctgcgccggtacagggaagggtggtcgatgcgcgaggccggcacggacgactcggcggccggagccggcgtcttcctcgcgtggaaggagcagcctctggtgtgggcaagcgcgtggcggccatga

SEQ ID NO: 221 - protein, 602 aa, Oryza sativa
MDTLFRLVSLQAASEQQQQQQQSASYNSRSTTSSGSRSSSHQTNASYSYYHHSSNSGGGGGGGGGYYYGGQQPPPSQYYYLEPYQEECGNAPHHQLYMDEDFSSSSSSRHFHHGARVQQQQPPASSTPTGTAPTPPLSTSSTAAGAGHGLFEAADLSFPPDLNLDFSSPASSSGGGTASSGAVGGGGGGRWASQLLLECARSVAARDSQRVQQLMWMLNELASPYGDVEQKLASYFLQGLFARLTASGPRTLRTLAAASDRNTSFDSTRRTALRFQELSPWSSFGHVAANGAILESFLEVAAAASSETQRFHILDLSNTFCTQWPTLLEALATRSADETPHLSITTVVSAAPSAPTAAVQRVMREIGQRMEKFARLMGVPFRFRAVHHSGDLAELDLDALDLREGGATTALAVNCVNSLRGVVPGRARRRDAFAASLRRLDPRVVTVVEEEADLVASDPDASSATEEGGDTEAAFLKVFGEGLRFFSAYMDSLEESFPKTSNERLALERGAGRAIVDLVSCPASESMERRETAASWARRMRSAGFSPVAFSEDVADDVRSLLRRYREGWSMREAGTDDSAAGAGVFLAWKEQPLVWASAWRP

SEQ ID NO: 222 - DNA, 1785 bp, Zea mays
atggatacgctgtttaggttggttagccttcaagcctccgaacagcagcagcagcagcaatcggcgtcctacaactcgaggagcaccacgtcgagcggctccaggtcgtcgtcgcaccagaccaacgcatcctacaactactactaccacagcaacagcagcggcggcggcggcggcgggcagtactactacggtcagcagcacccacagcagcaccagcaccagcagtactacctggagccgtaccagcaagaagaatgcggcaacacccaccacctttacatggatgaagacttctcctcctcgtcctcgtcgaggcagcatttccactcgcacggcgcggtggtgcagccgccgacgtcgtccacggccacgcccacggcgccgacgccctcgctgtccacgtcgtccacggccgctggggcggcgcacgcgctgttcgaggcggccgacctgtcgttcccgcctgacctcaacctcgacttctcatccccggcctcgtcgtccggcgggggcgcggcctcgtcggcggcggtcgggggaggtggcgggggaaggtgggcgagccagctgctgctggagtgcgcgcgcgcggtggcgggccgcgacagccagcgcgtgcagcagctgatgtggatgctcaacgagctggcctcgccgtacggggacgtcgagcagaagctggcgtcctacttcctccaggggctcttcgcgcgcctcacggcgtccggaccgcggacgctgcgcacgctcgcggcggcgtccgaccggaacacgtccttcgactccacgcggcgcacggcgctgcggttccaggagctcagcccgtggtcgtcgtttgggcacgtggccgccaacggcgccatcctggagtcgttcctggaggccgccgcggcgtcgccggagccccagaggctccacatcctcgacctcagcaacacgttctgcacgcagtggcccacgctgctggaggcgctcgccacgcggtccgccgacgacacgccgcacctgtcgatcaccacggtggtctcctccgcgccgtccgcgccgacggccgccgtgcagcgcgtgatgcgggagatcgggcagcggatggaaaagttcgcgcggctgatgggcgtgcccttcagcttccgcgcagtgcaccacgccggggaccttgcggggctcgacctcgacgcgctcgacctgcgcgacggcggcgccaccaccgcgctcgccatcaactgcgtcaactcgctgcgcggcgtggtgccgggcggtgcgcggagacgggacgcgttcgccgcgtccctccggcgtctcgatccgcgggttgttactgtcgtcgaggaggaggccgatctcgtggcttttgaccccggcgcgcccgaggaaagcggcgacacggaggcagcgttcctgaaggtgttcggcgagggcttgcggttcttctcggcttacatggactcgctggaagagagcttccccaagactagcaacgagaggctggcgctggagaggggagccggacgtgccattgtagacttggtctcgtgcccggcgtcggagtccatggagcggcgggagacggcggcttcatgggcgcgccgcatgcggtcttccggcttctctccggtggcgttcagcgaggacgtcgccgacgacgtgcggtcgttgctccgtcggtatcgggaaggctggtcgatgcgggacgccggtttagacgactcggcagccggagcaggcgtcttcctggcgtggaaggaacagcctctcgtgtgggcgagcgcgtggaggccatga

SEQ ID NO: 223 - protein, 594 aa, Zea mays
MDTLFRLVSLQASEQQQQQQSASYNSRSTTSSGSRSSSHQTNASYNYYYHSNSSGGGGGGQYYYGQQHPQQHQHQQYYLEPYQQEECGNTHHLYMDEDFSSSSSSRQHFHSHGAVVQPPTSSTATPTAPTPSLSTSSTAAGAAHALFEAADLSFPPDLNLDFSSPASSSGGGAASSAAVGGGGGGRWASQLLLECARAVAGRDSQRVQQLMWMLNELASPYGDVEQKLASYFLQGLFARLTASGPRTLRTLAAASDRNTSFDSTRRTALRFQELSPWSSFGHVAANGAILESFLEAAAASPEPQRLHILDLSNTFCTQWPTLLEALATRSADDTPHLSITTVVSSAPSAPTAAVQRVMREIGQRMEKFARLMGVPFSFRAVHHAGDLAGLDLDALDLRDGGATTALAINCVNSLRGVVPGGARRRDAFAASLRRLDPRVVTVVEEEADLVAFDPGAPEESGDTEAAFLKVFGEGLRFFSAYMDSLEESFPKTSNERLALERGAGRAIVDLVSCPASESMERRETAASWARRMRSSGFSPVAFSEDVADDVRSLLRRYREGWSMRDAGLDDSAAGAGVFLAWKEQPLVWASAWRP

SEQ ID NO: 224 - DNA, 1554 bp, Lactuca sativa
atggatactatgtccaccctccgacaccaacaactcctctctgattatcaacaacaacatcatcatcatcatcatcgtcaatctttcaactccaccgtaagttctagcagtcctagatcctccaccgatcatcaaacaaccaccggcgccggccattactaccaaccacaagaagaatgtttccctagtactttcttcatggaagaagatgatctctcttcttcttcctcattgcaacaacactactactcttctaaccagttacaaccccatttccaccaccagttttccgccactcctactcctacttccaccacaagcaccaccaccactcctcctccacctcccaagactcatggtttttcttctaattctgatcataccaactttaactactcgtcttcccaggatcatatcgctatggagttttcgaattcgttctccgccaacggctgggcgtcggatgtgttattggaggctgcgcgtgcggtggctgataagaacagcacgcgtctacagcagttgatgtggatgctcaacgagctcagttctccctatggcgatgtagatgagaagctttcttgttactttcttcaagcgctttacagtcggatgacggattccggtgagttgaattaccggaatttatcgtcgatttcggagaaagttagcacctttgaatcaaccagagaattggtgctcaagtttcaagaagtcagcccatggacgacgttcggacacgttgcgtgtaacggagcgatcttagaggcgttagacggcgagactaaattgcacattgttgatgtcagcaacacatactgcacacagtggccgacgttgctggaagccatcgccacccgggcagatgaagcaccacatctccgcctcacgacggtgatctcctccagatcagccggcagcgacggaatagagaggatcatgcgagaaatagggagtcggatggaaaaattcgccaggttaatgggtgtcccgtttaaattcaatgtgatacaccatatcggcgatttatccgatctgaattttagtcagttagctattcaatctgatgaagctcttgctataaacttaaatggcacgttacgttctgttagtaatcaccgtagggattatttgatctcgatgtttcggagtatgaaccctaaaataatgacgatcgtggaagaagaagctgatttggaagtggggattgatgggtttgaattcttgagaggatttcaagagtgtttgaaatggtttagggtttacttcgaagctctcaacgaaagctttcctcaaacgagtaccgagagattgatgttggagagggaggcggggcgggctgtgatggacttggtggcatgctcgccggcgaattccgtggagaggcgggagacggctaaccggtggtccagtagacttcgtgcaaatggttttggtggggtttcatatagcgaagaagggtgcgacgatgtccgggcactgctgaggaggtataaggaagggtggtcaatggctccgtcggaaacggcggccggaattttttttgatgcgtaa

SEQ ID NO: 225 - protein, 517 aa, Lactuca sativa
MDTMSTLRHQQLLSDYQQQHHHHHHRQSFNSTVSSSSPRSSTDHQTTTGAGHYYQPQEECFPSTFFMEEDDLSSSSSLQQHYYSSNQLQPHFHHQFSATPTPTSTTSTTTTPPPPPKTHGFSSNSDHTNFNYSSSQDHIAMEFSNSFSANGWASDVLLEAARAVADKNSTRLQQLMWMLNELSSPYGDVDEKLSCYFLQALYSRMTDSGELNYRNLSSISEKVSTFESTRELVLKFQEVSPWTTFGHVACNGAILEALDGETKLHIVDVSNTYCTQWPTLLEAIATRADEAPHLRLTTVISSRSAGSDGIERIMREIGSRMEKFARLMGVPFKFNVIHHIGDLSDLNFSQLAIQSDEALAINLNGTLRSVSNHRRDYLISMFRSMNPKIMTIVEEEADLEVGIDGFEFLRGFQECLKWFRVYFEALNESFPQTSTERLMLEREAGRAVMDLVACSPANSVERRETANRWSSRLRANGFGGVSYSEEGCDDVRALLRRYKEGWSMAPSETAAGIFFDA

SEQ ID NO: 226 - DNA, 1515 bp, Medicago truncatula
atggatacgctgtttaggcttgtcaattttcaacaacaacaacaacaatatcaacctgatccttccctcaactccaccaccaccttaacaacttctagcagctctagatcctcaagacaaacaacatatcattattacaaccaacaagaagaagacgaagaatgcttcaacaacttttattacatggatcataataacaacaatgatgaagatttatcctcatcttcttctaaacaacactattatacttatccttatgcttccactactactatcactactccaaacactacttataatactatcaacacccccaccacaactgataattactctttctcaccctcccatgattacttcaactttgaattctccggtcactcttggtcacaaaacatcctccttgaaactgcacgtgcattttccgacaataacacaaaccgaatccaacaactcatgtggatgctaaacgagcttagtaccccatatggtgacacagatcaaaaactttcatcttattttcttcaagctttgtttagtcgcatgaacgacgcgggagatagaacctacaaaaccttaacaaccgcgtcggaaaaaacatgttcctttgattcaacgaggaagatgttgttgaagttccaagaagttagtccatggacaacgtttggacacgtggcagctaacggtgctatcttagaagcattggaaggtaaccctaaacttcacataattgatattagcaacacttattgcactcaatggccaacactcctcgaagcgttggccacccgctctgatgatacgcctcaccttcgtttaaccactgtagtcactgcaatcagcggtggctcggtgcaaaaagtcatgaaggaaattggttcaaggatggaaaaatttgctaggcttatgggagtgccgtttaaattcaaaatcattttcagtgatttaagagagttgaatttgtgtgatttagatattaaagaagatgaagctttggctataaactgtgtaaactctttacattcgatatccggagccggaaaccaccgtgatttgtttatatctttgcttcgtgggttagaacctagggttttaactattgttgaagaagaagctgatttagaagtttgttttggttcggatttcgtggaaggttttaaagagtgtttaagatggtttagggtttattttgaagcacttgatgaaagtttttcaagaacaagtagtgagaggttgatgctagaaagagaagctgggagaggtattgttgatttggttgcttgtgatccttatgagtcagtggagagacgtgaaacggcggcgcggtggaggaggaggttgcatggtggcgggtttaatacggtgtcgtttagtgatgaagtttgtgatgatgttagggctttattgagaaggtataaagaagggtggtcgatgacatcctccgatggtgataccggaatattcttgtcgtggaaggataagccggtggtgtgggccagtgtatggaggccttga

SEQ ID NO: 227 - protein, 504 aa, Medicago truncatula
MDTLFRLVNFQQQQQQYQPDPSLNSTTTLTTSSSSRSSRQTTYHYYNQQEEDEECFNNFYYMDHNNNNDEDLSSSSSKQHYYTYPYASTTTITTPNTTYNTINTPTTTDNYSFSPSHDYFNFEFSGHSWSQNILLETARAFSDNNTNRIQQLMWMLNELSTPYGDTDQKLSSYFLQALFSRMNDAGDRTYKTLTTASEKTCSFDSTRKMLLKFQEVSPWTTFGHVAANGAILEALEGNPKLHIIDISNTYCTQWPTLLEALATRSDDTPHLRLTTVVTAISGGSVQKVMKEIGSRMEKFARLMGVPFKFKIIFSDLRELNLCDLDIKEDEALAINCVNSLHSISGAGNHRDLFISLLRGLEPRVLTIVEEEADLEVCFGSDFVEGFKECLRWFRVYFEALDESFSRTSSERLMLEREAGRGIVDLVACDPYESVERRETAARWRRRLHGGGFNTVSFSDEVCDDVRALLRRYKEGWSMTSSDGDTGIFLSWKDKPVVWASVWRP

SEQ ID NO: 228 - DNA, 1539 bp, Solanum tuberosum
atggatactttgtttagattagttacccttcaacaacaacaacaacaacaacaatctgatcaatattcttttaactccagcagaacttcaagcagctctagatcttctaacaaacaaaacacatataattatcatccacatcataataatcaagacgaagaatgcttcaactttttcatggatgaagatgatttctcttcttcttcttctaaacacaacaacaactatcctcctcctcattacaatcaatatcatcaacaaatttccaacactcccacaccgacaactacaagcagtaccccgacacaacaatctcaatctcatcactatgatcatcaattctccccagcacgtgatttaaatctcgaattcgcttcctcattttccggaaaatgggcgacggacattcttctagaaacttctcgtgccattgccgataagaacagtacacgtgtccaacaactcatgtggatgttgaatgagttgagttctccatatggagataccgaacaaaaattggcttcttattttcttcaagcattatttagccgtatgacggattctggcgaacgatgttatcgtacgttgttatccgcttcggataaaacatgttcgttcgagtcaacgaggaaattagttttgaaatttcaggaagttagcccttggacgacttttggtcacgttgcatccaatggtgcaattatggaagccttagaaggtgagtcaaagttgcatataattgatattagcaacacttattgtactcaatggcctactttactagaagcgctagcaacccgcaccgatgaaacaccgcatctccgcctcaccacggtggttgccgctagcggaggtgcagcgtccgtgcaaaaagtgatgaaggagattggtaatagaatggaaaaattcgctaggcttatgggcgtaccgtttaaattcaacgtcattcaccatgcgggaaatttatctgagttggatattggtgccttagatattaaaggagatgaagcgctagcaattaattgtattggtgcgttacattccgttacgccagctggcaatcgaagggattatttgatatcattatttaggaggttacaacctaggattgttacaattgttgaagaagaagctgatcttgatgttggtgttgatggtttcgattttgttaaaggttttcaagaatgtttgaaatggcttagggtttattttgaatcattagacgagagtttttcgaaaacaagtaacgaacgtttgatgctagagcgacaagcaggacgttcgattgttgatttactagcatgcccaccatcggagtcaatggagaggcgggaaacgggggcaaaatggtcacatcgtatgcatgcaggagggttcagtcagcttttatatagtgatgaagtttgtgatgatgttagagctttgttgagaaggtataaagatgggtggtcgatgggacagtgtgggggagattccgccggaatattcttgtcgtggaaggaacagccggtggtgtgggccagtgcatggaagccttaa

SEQ ID NO: 229 - protein, 512 aa, Solanum tuberosum
MDTLFRLVTLQQQQQQQQSDQYSFNSSRTSSSSRSSNKQNTYNYHPHHNNQDEECFNFFMDEDDFSSSSSKHNNNYPPPHYNQYHQQISNTPTPTTTSSTPTQQSQSHHYDHQFSPARDLNLEFASSFSGKWATDILLETSRAIADKNSTRVQQLMWMLNELSSPYGDTEQKLASYFLQALFSRMTDSGERCYRTLLSASDKTCSFESTRKLVLKFQEVSPWTTFGHVASNGAIMEALEGESKLHIIDISNTYCTQWPTLLEALATRTDETPHLRLTTVVAASGGAASVQKVMKEIGNRMEKFARLMGVPFKFNVIHHAGNLSELDIGALDIKGDEALAINCIGALHSVTPAGNRRDYLISLFRRLQPRIVTIVEEEADLDVGVDGFDFVKGFQECLKWLRVYFESLDESFSKTSNERLMLERQAGRSIVDLLACPPSESMERRETGAKWSHRMHAGGFSQLLYSDEVCDDVRALLRRYKDGWSMGQCGGDSAGIFLSWKEQPVVWASAWKP

SEQ ID NO: 230 - DNA, 1485 bp, Eucalyptus grandis
atggataccttgtttagactagtgagccttcaatcctccgatcagtccttcaactcaagcaggacctcaagcagctccagatcctcccgacaaaaccatcactaccatcaccagccagaagcggacgaagaatgcctcaacatcttcatggatgaagaagacttctcctcgtcttcttccaagcactacagttatccttatcaccccgccaccaccagcaccacccctaccaccactagtagtactcacactccccacacttatgaccctgccgatgtatccgtctcgcccgcccgcgacctcaacttcgacttctctagcaagtgggcctctgacatcctcctcgagacggcccgtgccatcgtcgacaagaacagcacccgtgtccagcaccttatgtggatgctcaatgagctctgctccccttatggcgacatcgagcagaagctggcctcctacttcctccaggccctgtttagtcgcatgacggactcgggcgagcggagctacagtgcctggttggccgcgtcggacaagacctgctccttcgagtccacccggaagatggtgctcaagttccaggaggtgagcccctggaccaccttcgggcacgtcgcgtgcaacggcgcaatcatggaggcccttgagggggagagcaagttgcacatagttgacatcagcaacacgtactgcacccagtggccaaccctgctcgaggctctggccacccggacggatgagacgccacacctgcggctcaccaccgtggtggtgagcaaggcgaacggcggggcagagactagtggcgtcgtcgccgtgcagaaggtcatgaaagaaattgggagccggatggagaaatttgcgaggctcatgggtgtgcccttcaagttcagcgtcctgtaccacagtggcgacctgtcagagttgaatttggacgagttggatatcaaggaggacgaggcgctggccatcaactgcgttggcgcgctgcactcgacaacgacagtcagcaaccgccgggactttgtggtctcatctttccgaaggttgcaaccgaggataatcacggttgttgaggaggaagccgacctcgacgtgggcgtggatgggatcgaatttgtcaggggtttccaagaaagcctgagatattttagggtttacttcgagtcgttggacgagagcttccctagaacgagcaacgagcgcttgatgctcgagcgaggggctgggcgagcggtcatggacctggtggcatgcccaccacaccactcggtggagaggcgggagccagcaagccggtggtcgaggcgcctgcgaggaggcgggtttaatccttgtttgttcagcgacgaggtatgcgacgacgtgcgtgccttgttgaggaggtacaaggaagggtggtcgatgacgccgtgctctgacgccggaatattcttgacgtggaaggaccagccggtggtttgggctagtgcatggagggcttga

SEQ ID NO: 231 - protein, 494 aa, Eucalyptus grandis
MDTLFRLVSLQSSDQSFNSSRTSSSSRSSRQNHHYHHQPEADEECLNIFMDEEDFSSSSSKHYSYPYHPATTSTTPTTTSSTHTPHTYDPADVSVSPARDLNFDFSSKWASDILLETARAIVDKNSTRVQHLMWMLNELCSPYGDIEQKLASYFLQALFSRMTDSGERSYSAWLAASDKTCSFESTRKMVLKFQEVSPWTTFGHVACNGAIMEALEGESKLHIVDISNTYCTQWPTLLEALATRTDETPHLRLTTVVVSKANGGAETSGVVAVQKVMKEIGSRMEKFARLMGVPFKFSVLYHSGDLSELNLDELDIKEDEALAINCVGALHSTTTVSNRRDFVVSSFRRLQPRIITVVEEEADLDVGVDGIEFVRGFQESLRYFRVYFESLDESFPRTSNERLMLERGAGRAVMDLVACPPHHSVERREPASRWSRRLRGGGFNPCLFSDEVCDDVRALLRRYKEGWSMTPCSDAGIFLTWKDQPVVWASAWRA

SEQ ID NO: 232 - DNA, 1485 bp, Vitis vinifera
  misc_feature (270)..(270): n is a, c, g, or t
atggataccttgtttagactagtcagtcttcaatccgatcaatcctacaactccagtagaacttctagcagctctagatcttctagacaaaaccatcaccaccaccaccaagaagacgaagaatgcttcaactttttcatggatgaagaagacttctcttcttcttcttccaagcactactatccttatcagcaacaaacccatccttcttcaccaccacccccaccaccaccaacaccagcactcctactcatcatgcctttgagcccnaccgaattctctttctcccctgcccgtgatctccacctagaattcaactcttctgcttccggcaagtgggcttccgaaatcctcctggagacagcacgagccatcgctgataagaacagcgctcgcgttcaacaactcatgtggatgctcaacgagcttagctctccttatggcgacaccgatcagaagctcgctgcttacttccttcaagccttgtttagccgcatgaccgactcgggtgagaggtgttaccggactttaatatccgcatcggagaagacttgctcattcgaatccaccagaaaaatggtattgaaatttcaagaggtgagcccttggaccacgtttggacatgtagcttgtaatggtgcaatcatggaagctcttgaaggcgagagcaagctccatataattgatataagcaacacctactgcactcagtggcccaccttgctcgaagccctagccacccgcactgacgagacccctcacctccgtctcaccaccgtcgtcacaagcaaagccggcaccggagggatggcaccagtgcaaaaactgatgaaagagattggaaacagaatggaaaagttcgctaggctcatgggtgtgcccttcaaattcaacgtactgcaccactccggcgacctatcccatctgaatttagcagaattggacatcaaagacgacgaggcactcgccgtaaactgcgtcggcgcgttgcactcagtcaccgcagttggtaaccgccgagacatcgtcgtatcatctttccggagattgcatccgaggatcatcaccgtcgtggaagaagaagctgatctcgatgtgggcgtggatgggttcgacttcgtcaaaggttttcaggaatgcttaagatggtttagggtttacttggagtcattagacgagagcttcccacgcactagcaacgagcgcctcatgctcgaacgcgccgccggacgmgcaatcgtcgacctggtggcttgcccgccgtcggagtcgatcgaacggcgcgagacggccacgcgctggtckcagcggctccatgcaagcgggttctctccggtgtcgtttagcgatgaagtatgcgatgacgtacgtgctctcctgaggagatacaaggagggttggtcaatgacacagtcctccgacgccggaatattcctctcatggaaagaccagccggtggtgtggaccagtgcatggaaaccttga

SEQ ID NO: 233 - protein, 494 aa, Vitis vinifera
MDTLFRLVSLQSDQSYNSSRTSSSSRSSRQNHHHHHQEDEECFNFFMDEEDFSSSSSKHYYPYQQQTHPSSPPPPPPPTPALLLIMPLSPTEFSFSPARDLHLEFNSSASGKWASEILLETARAIADKNSARVQQLMWMLNELSSPYGDTDQKLAAYFLQALFSRMTDSGERCYRTLISASEKTCSFESTRKMVLKFQEVSPWTTFGHVACNGAIMEALEGESKLHIIDISNTYCTQWPTLLEALATRTDETPHLRLTTVVTSKAGTGGMAPVQKLMKEIGNRMEKFARLMGVPFKFNVLHHSGDLSHLNLAELDIKDDEALAVNCVGALHSVTAVGNRRDIVVSSFRRLHPRIITVVEEEADLDVGVDGFDFVKGFQECLRWFRVYLESLDESFPRTSNERLMLERAAGRAIVDLVACPPSESIERRETATRWSQRLHASGFSPVSFSDEVCDDVRALLRRYKEGWSMTQSSDAGIFLSWKDQPVVWTSAWKP

SEQ ID NO: 234 - DNA, 1533 bp, Populus trichocarpa
atggataccttgtttaggctagttagtctccaacaacaatctgaacaatctttcaactctactagcagaacctctagtagctctagatcatcaagacaaaacaacaaccaccaccatcatcactatcaacaagaagacgaagaatgcttcaactttttcatggatgaggaagacttctcttcatcttcttctaagcactactatcctccttatcaccacaaccaacaacaacaacatcaacaccaaaccaccaccaccactcctaccactactaccaccaacactagcaccccttctactcaccatgtccttgattccgctgacttctctttctccccttctcatgacctaaactttgaattttccggcaagtgggtcaccgatatcctccttgaatctgcacatgccatcgcggataaaaacagcgctcgtctccagcaattgatgtggatgcttaatgagcttggttcaccttatggtgacacagagcaaaaacttgcttcttattttctccaagctttgtttagccgcatgaacgactccggcgagagatgctaccgtactttagcttcagcatcagagaaaacttgctcttttgattccacaaggaaaatggtattaaagtttcaagaggtgagtccttggactacttttggtcacgtatcttgtaatggcgcaattatggaagcatttgaaggtgaaagcaaattgcatattattgatattagtaacacatattgtacccaatggcctactttgctcgaagccctagcaactcgcactgatgagacaccacacttgaagttaaccaccgtagtggctagcaaaagtagtggtaataatattggtttaactagtacaggaggtttagcttcagttcataaggtaatgaaagaaattggcaacagaatggaaaaatttgccaggcttatgggagtcccatttaagtttaatgttatccaccatgctggtgatttatgtgacctaaacttagctgaattggatgttaaagatgatgaggctcttgctatcaactgtgttggtgctttacactcaatcactccagcttctcgtcgccgagattatgttatatctagttttagaacattgcaaccaagaatcattactgttgttgaagaagaagctgatcttgatggtctggattttgtcaagggttttcaagaatgtttaagatggtttagggtttactttgaatcattggatgagagctttccaagaaccagtaacgaacagttgatgcttgaaagagcagcaggccgcgctatcgttgacttagtggcatgtcctccatctgattcgatcgaaaggcgggaaacagccacgcgctggtctggacgcctccattcatgtggttttagcccgataattttcagtgatgaggtttgtgatgatgtacgcgccttattgaggaggtataaggagggttggtcaatgacacagtgcggggatgccggaatattcttgtgctggaaggaacagccggtggtgtgggctagtgcatggaggccctga

SEQ ID NO: 235 - protein, 510 aa, Populus trichocarpa
MDTLFRLVSLQQQSEQSFNSTSRTSSSSRSSRQNNNHHHHHYQQEDEECFNFFMDEEDFSSSSSKHYYPPYHHNQQQQHQHQTTTTTPTTTTTNTSTPSTHHVLDSADFSFSPSHDLNFEFSGKWVTDILLESAHAIADKNSARLQQLMWMLNELGSPYGDTEQKLASYFLQALFSRMNDSGERCYRTLASASEKTCSFDSTRKMVLKFQEVSPWTTFGHVSCNGAIMEAFEGESKLHIIDISNTYCTQWPTLLEALATRTDETPHLKLTTVVASKSSGNNIGLTSTGGLASVHKVMKEIGNRMEKFARLMGVPFKFNVIHHAGDLCDLNLAELDVKDDEALAINCVGALHSITPASRRRDYVISSFRTLQPRIITVVEEEADLDGLDFVKGFQECLRWFRVYFESLDESFPRTSNEQLMLERAAGRAIVDLVACPPSDSIERRETATRWSGRLHSCGFSPIIFSDEVCDDVRALLRRYKEGWSMTQCGDAGIFLCWKEQPVVWASAWRP

SEQ ID NO: 236 - DNA, 1539 bp, Ricinus communis
atggatacgttgtttaggctagttagtcttcaacaacagcaatctgatcaatctttcaataactctactagcagaacctctagcagctctagatcctcaagacaaaacaaccaccaccatcatcatcatcagtaccaacaagaagacgaagaatgcttcaactttttcatggatgaagaagacttctcttcgtcttcttctaaacactactatccttatcaccatcaacaacagcaacaacacaccaccgccaccactactactactactgtgaccactcctaacactaccactagtactcttgaatccactgaccacttctctttctctccttcccatgacctaaactttgacttctccagcaggtgggcaaccgatatcctcctcgaaactgctcgtgctattgctgataaaaacagtgctcgtgttcagcaactcatgtggatgcttaatgaacttggctcgccttatggggacatagacaaaaagcttgcatcatactttctacaagccttgttcagccggatgactgattccggtgagagatgttaccgtactttagcctctgcatcggataaaacttgctctttcgagtcaacaagaaagatggtattgaagtttcaagaggtgagtccttggactacttttggtcacgtatcttgtaatggtgcaataatggaagcatttgaaggtgaaagtaaattgcatattattgatattagtaacacatattgcactcagtggccaacgttgctagaagccctagcaactcgcaccgatgagacaccccacttgaggctaaccaccattgtggctagtaaaacaaatggtggtgggggcggcggcggtggcaattgtggtttagtttcagcccagaaagtaatgaaagaaattggaagcagaatggaaaaatttgctaggcttatgggagtaccatttaaattcaatgttatacaccatgctggtgacttgtgtgacctgaacttatctgaattggatattaaagaagatgaagctttagccatcaattgtatagggtcactgcattcagttacaacagttgctaatcgtagagattatataatatcaaactttagaagattacaaccaagaatcatcactattgttgaagaagaagctgatcttgatgtgggtattgatgggttagactttgtaagaggttttcaagaatgtttaagatggtttagggtttactttgagtcattagaagaaagtttttcaagaacaagcaatgaaagattgatgctagagagaagtgctggacgtgcaatagttgacttggttgcatgtcagccatcagagtcaattgaacggcgggaaaaggcgacacggtggtcctcacggttgcatgcatgtggatatagccctattctgtttagtgatgaggtatgcgatgatgtacgcgcccttttgaggaggtataaggaaggctggtcaatgacacagagcggccacgccggaatattcctatgctggaaggaacagccggtcgtgtgggctagtgcatggaaaccttga

SEQ ID NO: 237 - protein, 512 aa, Ricinus communis
MDTLFRLVSLQQQQSDQSFNNSTSRTSSSSRSSRQNNHHHHHHQYQQEDEECFNFFMDEEDFSSSSSKHYYPYHHQQQQQHTTATTTTTTVTTPNTTTSTLESTDHFSFSPSHDLNFDFSSRWATDILLETARAIADKNSARVQQLMWMLNELGSPYGDIDKKLASYFLQALFSRMTDSGERCYRTLASASDKTCSFESTRKMVLKFQEVSPWTTFGHVSCNGAIMEAFEGESKLHIIDISNTYCTQWPTLLEALATRTDETPHLRLTTIVASKTNGGGGGGGGNCGLVSAQKVMKEIGSRMEKFARLMGVPFKFNVIHHAGDLCDLNLSELDIKEDEALAINCIGSLHSVTTVANRRDYIISNFRRLQPRIITIVEEEADLDVGIDGLDFVRGFQECLRWFRVYFESLEESFSRTSNERLMLERSAGRAIVDLVACQPSESIERREKATRWSSRLHACGYSPILFSDEVCDDVRALLRRYKEGWSMTQSGHAGIFLCWKEQPVVWASAWKP

SEQ ID NO: 238 - DNA, 1512 bp, Glycine max
atggataccttgtttagactagtaagttttcatcaacagcaacaaccacaacaacaacctgatccatccctcaactccaccaccagcagaacctccagcagctccagatcctccagacaaaactactacccttattcccatcaagaagaagaagaatgcttcaacttttacatggatgaagaagacttatcctcgtcttcttccaaacactactaccacccttatcaaccccatcatcatcaacaacacaacgtatccaacatttctacaaacaccttcagcaccacccctaacactgattactcctactcctactccttctctcccacgcaacctgttcaagacttcaacttcgaattctcctcccccaactggtcccacaacctcctcctcgaatccgcacgcgccgtcgccgacaacaactccacgcgcctccaccacctcctctggatgctcaacgagctcagctccccctacggcgacaccgaacaaaaacttgctgcgtatttcctccgagccttgttcagccgcgtcaccgaagctggcgaccgaacctaccgaagcttagcttcggcgtctgagaaaacatgctcatttgaatccacaagaaaaacggtcctgaaattccaagaagttagcccttggactaccttcggacacgtggcatccaatggcgccatcttggaagccttggagggaaactccaaattgcatatacttgacatcagcaacacttattgcacccagtggccaatgcttctggaagcattggccactcggagcgaagaaactccacacctatgtttaacaacaattgttactggttctagaatcggtaacaacgtccagcgcgtgatgaaggaaatcggaacgcgaatggagaaattcgccagactcatgggcgttccttttaagttcaacgtcgttcatcactacggcgatctatccgagttcaatttctcagagcttgatatcaaagacgatgaggctttggctgtgaattgtgtgaactcgctgcattcggtttccgcgctaggaaacaaccgcgacgcgttgatatcggcgttgcaagcgttgcagccgcggattgtgacggtggtggaggaggaggctgatttggacgttggaatcgacggttacgagttcgtaaaaggctttgaagaaagtttgaggtggtttagggtttactttgaggctttggatgagagttttgtgaagacgagcaacgagaggctgatgctggagcgcgcggcggggagggcggtggtggacctggtggcgtgctcgccggcggattccgtggagcgccgcgagacggcggcgcggtgggcggcgaggcttcacaacggagggctaaacgcggcgccgtttagcgacgaagtttgcgacgacgtgagggcgctgttgaggaggtacaaggaagggtggtcgatggcggcgtgctccgacgccggaatattcctctcgtggaaggacacgccggtggtgtgggccagtgcatggaggccataa

SEQ ID NO: 239 - protein, 503 aa, Glycine max
MDTLFRLVSFHQQQQPQQQPDPSLNSTTSRTSSSSRSSRQNYYPYSHQEEEECFNFYMDEEDLSSSSSKHYYHPYQPHHHQQHNVSNISTNTFSTTPNTDYSYSYSFSPTQPVQDFNFEFSSPNWSHNLLLESARAVADNNSTRLHHLLWMLNELSSPYGDTEQKLAAYFLRALFSRVTEAGDRTYRSLASASEKTCSFESTRKTVLKFQEVSPWTTFGHVASNGAILEALEGNSKLHILDISNTYCTQWPMLLEALATRSEETPHLCLTTIVTGSRIGNNVQRVMKEIGTRMEKFARLMGVPFKFNVVHHYGDLSEFNFSELDIKDDEALAVNCVNSLHSVSALGNNRDALISALQALQPRIVTVVEEEADLDVGIDGYEFVKGFEESLRWFRVYFEALDESFVKTSNERLMLERAAGRAVVDLVACSPADSVERRETAARWAARLHNGGLNAAPFSDEVCDDVRALLRRYKEGWSMAACSDAGIFLSWKDTPVVWASAWRP

SEQ ID NO: 240 - DNA, 1476 bp, Medicago truncatula
atggatacattgtttagacttgtcagttttcaaccacaccaacaacaagaagatcaatctctcaactccaccaccagcagaacaacaacatcaagtagctctcgatcctcaaaacaaaactatcaccaatattacaatccacaagaagttgaagaagaatgcttcaactttttcatggatgaagaagacctttcctcatcttcttccaaacactactatccttataatcaacctcaaacctcaaatactattactacaaacacccccacaacatcactcacaccccctccaccaacagctgatttcaccttcgaattaaccggaaggtgggccaacaacatcctcctcgaaacagcacgagccatagcagaaaaaaacagcactcgtttacaacaactcatgtggatgcttaacgaactaagctccccttatggtgacatagaacaaaaactagctgcatattttctccaagccttattctctcgaatgaccgaagccggtacccgaaccttccgaaccctagcttcagcatcagaaaaaacttgctctttcgaatcaacaagaaaaacggttctaaaattccaagaagttagtccgtggacaaccttcggccatgtcgcatgcaatggcgccattttagaagccttcgaaggtgattccaagctgcacataattgatattagtaacacttattgcactcagtggccaactctttttgaagcgttggccactcgtgctgacgatactcctcacctccgtctaactaccatcgtcactgctggtggttctgttcaaaaagttatgaaggaaattggtgctagaatggaaaaattcgctagactcatgggagttccatttaaattcaacgttattcatcactccggcgatctttctgatttgaattttttggatttagatattaaagaagatgaagctttagctgttaattgtgttaatgctttgcattcagtaacagttggcaatggtaatggtaacggtaataaccgtcgtgactcgttgatagcttcgttgatcgcgttgcggcctaggatagtaacaatggttgaagaggaggctgatttaaattttggtaatgaaggatatgaatttgtgaatggttttgaagagtgtttaaggtggtttagggtttactttgaagcattagaagagagttttccgaagacgagtaacgagcgtttgatgcttgaaagggaagcagggagagggatagttgatttggtggcatgtgctccggcggagtcgattgaacggagagaaactgcggtgaggtggtcacggcgtttgcatggtcgagggtttaatacggtggcgtttagtgaggaagtttgtgatgatgttagggctttgttgaggaggtataaggaagggtggtcgatgatacggtgtaatgatgccggaatattcttgacgtggaaggaacaaccggtggtgtgggccagtgcatggaggccttga

SEQ ID NO: 241 - protein, 491 aa, Medicago truncatula
MDTLFRLVSFQPHQQQEDQSLNSTTSRTTTSSSSRSSKQNYHQYYNPQEVEEECFNFFMDEEDLSSSSSKHYYPYNQPQTSNTITTNTPTTSLTPPPPTADFTFELTGRWANNILLETARAIAEKNSTRLQQLMWMLNELSSPYGDIEQKLAAYFLQALFSRMTEAGTRTFRTLASASEKTCSFESTRKTVLKFQEVSPWTTFGHVACNGAILEAFEGDSKLHIIDISNTYCTQWPTLFEALATRADDTPHLRLTTIVTAGGSVQKVMKEIGARMEKFARLMGVPFKFNVIHHSGDLSDLNFLDLDIKEDEALAVNCVNALHSVTVGNGNGNGNNRRDSLIASLIALRPRIVTMVEEEADLNFGNEGYEFVNGFEECLRWFRVYFEALEESFPKTSNERLMLEREAGRGIVDLVACAPAESIERRETAVRWSRRLHGRGFNTVAFSEEVCDDVRALLRRYKEGWSMIRCNDAGIFLTWKEQPVVWASAWRP

SEQ ID NO: 242 - DNA, 2194 bp, Oryza sativa; identical to SEQ ID NO: 45

SEQ ID NO: 243 - DNA, 60 bp, Artificial sequence
  primer: prm07341
ggggacaagtttgtacaaaaaagcaggcttaaacaatggatactctctttagactagtca

SEQ ID NO: 244 - DNA, 50 bp, Artificial sequence
  primer: prm07342
ggggaccactttgtacaagaaagctgggtaaataaaaacaaccctttacg
